(19) United States
(12) Patent Application Publication
(10) Pub. No.: US 2025/0017970 A1
(43) Pub. Date: Jan. 16, 2025

(54) Reduced Expression of Sarm1 For Use In Cell Therapy

(71) Applicant: EMENDOBIO INC., Wilmington, DE (US)

(72) Inventors: Rafi EMMANUEL, Ramla (IL); Michal GOLAN MASHIACH, Ness-Ziona (IL); Rachel DIAMANT, Ein Vered (IL)

(21) Appl. No.: 18/715,348

(22) PCT Filed: Dec. 1, 2022
(86) PCT No.: PCT/US2022/080749

§ 371 Date: May 31, 2024

Related U.S. Application Data
(60) Provisional application No. 63/284,995, filed on Dec. 1, 2021.

(51) Int. Cl. A61K 35/17; C12N 5/0783; C12N 9/22; C12N 15/11

(52) U.S. Cl. CPC A61K 35/17; C12N 5/0646; C12N 9/22; C12N 15/111; C12N 2310/20

(57) ABSTRACT

The invention relates to a method for adoptive cell therapy or prophylaxis comprising administering SARM1-inhibited or SARM1-inactivated cells to a subject suffering from or determined to be at risk of suffering from a cancer, infection, disease, or disorder.

[0001] This application claims the benefit of U.S. Provisional Application No. 63/284,995, filed Dec. 1, 2021, the contents of which are hereby incorporated by reference.

[0002] Throughout this application, various publications are referenced, including referenced in parenthesis. The disclosures of all publications mentioned in this application in their entireties are hereby incorporated by reference into this application in order to provide additional description of the art to which this invention pertains and of the features in the art which can be employed with this invention.

### REFERENCE TO SEQUENCE LISTING

[0003] This application incorporates-by-reference nucleotide sequences which are present in the file named “221201_91818-A-PCT_Sequence_Listing_AWG.xml”, which is 11,660 kilobytes in size, and which was created on Dec. 1, 2022 in the IBM-PC machine format, having an operating system compatibility with MS-Windows, which is contained in the XML file filed Dec. 1, 2022 as part of this application.

### BACKGROUND OF INVENTION

[0004] Immunotherapies such as CAR T-cell therapies provide a promising approach for treating several diseases and disorders. However, to make such therapies more effective, it is highly desirable to develop an allogeneic adoptive transfer strategy in which the engineered cells have increased persistence upon transfer to the patient.

### SUMMARY OF THE INVENTION

[0005] The sterile alpha and TIR motif-containing 1 (SARM1) gene is a NAD+ hydrolase that acts as a negative regulator of MYD88- and TRIF-dependent toll-like receptor signaling pathway by promoting Wallerian degeneration, an injury-induced form of programmed subcellular death. SARM1 can also activate cell death in response to stress (Molday et al., 2013).

[0006] Disclosed are approaches for knocking out, knocking down, or inhibiting expression of the SARM1 gene in engineered immune cell types to increase their persistence, proliferation, and/or retention during cell therapy. Accordingly, biallelic knockout, knockdowns, or inhibition of expression of the SARM1 gene in cell therapy-related cell types as described herein may be utilized to improve cell therapy approaches, including for the treatment of cancers.

[0007] The present disclosure also provides a method for adoptive cell therapy or prophylaxis comprising administering SARM1-inhibited or SARM1-inactivated cells to a subject suffering from or determined to be at risk of suffering from a cancer, infection, disease, or disorder. In some embodiments, the cells are immune cells (e.g., lymphocyte, monocyte, or macrophages). In some embodiments the SARM1-inhibited immune cells are autologous. In other embodiments the SARM1-inhibited immune cells are allogeneic.

### BRIEF DESCRIPTION OF THE DRAWINGS

[0008] FIGS. 1A-1B: Screen for activity of RNA guide molecules targeting SARM1 in HeLa cells. Cells were harvested 72 h post DNA transfection. Genomic DNA was extracted and used for capillary electrophoreses after amplifying the endogenous genomic regions using on-target primers. The graph represents the average of % editing±standard deviation (STDV) of three (3) independent experiments. FIG. 1A: An SpCas9 coding plasmid was co-transfected with a plasmid expressing the indicated RNA guide molecule. FIG. 1B: An OMNI-50 or OMNI-79 CRISPR nuclease was co-transfected with the indicated RNA guide molecule.

[0009] FIG. 2: RNPs of a SpCas9 nuclease complexed with a specific RNA guide molecule were electroporated into Neuro-2a cells to determine RNP activity. Cells were harvested 72 hours post DNA electroporation, genomic DNA was extracted, and then analyzed by next-generation sequencing (NGS). The graph editing represents the % of editing±STDV of two (2) independent electroporations.

[0010] FIG. 3: Relative amount of SARM1 RNA after editing. Neuro-2a cells were harvested seven (7) days post electroporation, RNA was extracted and reverse transcribed. The relative amount of SARM1 RNA was quantified using AriaMx system. The level of the mRNA is quantified relative to untreated cells that were not edited.

[0011] FIG. 4: Editing activity of OMNI-103 CRISPR nuclease with an RNA guide molecule targeting SARM1 in HeLa cells. Specific RNA guide molecules were-co-transfected with OMNI-103 CRISPR nuclease to determine their on-target activity. Cells were harvested 72 hours post DNA transfection, genomic DNA was extracted, and the region of the mutation was amplified and analyzed by NGS. Transfection efficiency was measured by mCherry fluorescence. The graph represents the % of editing±STDV of three (3) independent transfections.

[0012] FIG. 5: SARM1 pathway diagram.

[0013] FIG. 6A: SARM1 editing and NGS results. FIG. 6B: Killing assay. FIG. 6C: Viability (ATPlite) assay.

### DETAILED DESCRIPTION

[0014] Unless otherwise defined, all technical and/or scientific terms used herein have the same meaning as commonly understood by one of ordinary skill in the art to which the invention pertains. Although methods and materials similar or equivalent to those described herein can be used in the practice or testing of embodiments of the invention, exemplary methods and/or materials are described below. In case of conflict, the patent specification, including definitions, will control. In addition, the materials, methods, and examples are illustrative only and are not intended to be necessarily limiting.

[0015] It should be understood that the terms “a” and “an” as used above and elsewhere herein refer to “one or more” of the enumerated components. It will be clear to one of ordinary skill in the art that the use of the singular includes the plural unless specifically stated otherwise. Therefore, the terms “a,” “an” and “at least one” are used interchangeably in this application.

[0016] For purposes of better understanding the present teachings and in no way limiting the scope of the teachings, unless otherwise indicated, all numbers expressing quantities, percentages or proportions, and other numerical values used in the specification and claims, are to be understood as being modified in all instances by the term “about.” Accordingly, unless indicated to the contrary, the numerical parameters set forth in the following specification and attached claims are approximations that may vary depending upon the desired properties sought to be obtained. At the very least, each numerical parameter should at least be construed in light of the number of reported significant digits and by applying ordinary rounding techniques.

[0017] Unless otherwise stated, adjectives such as “substantially” and “about” modifying a condition or relationship characteristic of a feature or features of an embodiment of the invention, are understood to mean that the condition or characteristic is defined to within tolerances that are acceptable for operation of the embodiment for an application for which it is intended. Unless otherwise indicated, the word “or” in the specification and claims is considered to be the inclusive “or” rather than the exclusive or, and indicates at least one of, or any combination of items it conjoins.

[0018] In the description and claims of the present application, each of the verbs, “comprise,” “include” and “have” and conjugates thereof, are used to indicate that the object or objects of the verb are not necessarily a complete listing of components, elements or parts of the subject or subjects of the verb. Other terms as used herein are meant to be defined by their well-known meanings in the art.

[0019] In some embodiments of the present invention, a DNA nuclease is utilized to affect a DNA break at a target site to induce cellular repair mechanisms, for example, but not limited to, non-homologous end-joining (NHEJ). During classical NHEJ, two ends of a double-strand break (DSB) site are ligated together in a fast but also inaccurate manner (i.e. frequently resulting in mutation of the DNA at the cleavage site in the form of small insertion or deletions).

[0020] As used herein, the term “modified cells” refers to cells in which a double strand break is affected by a complex of an RNA molecule and the CRISPR nuclease as a result of hybridization with the target sequence, i.e. on-target hybridization.

[0021] As used herein, the term “targeting sequence” or “targeting molecule” refers a nucleotide sequence or molecule comprising a nucleotide sequence that is capable of hybridizing to a specific target sequence, e.g., the targeting sequence has a nucleotide sequence which is at least partially complementary to the sequence being targeted along the length of the targeting sequence. The targeting sequence or targeting molecule may be part of an RNA molecule that can form a complex with a CRISPR nuclease, either alone or in combination with other RNA molecules, with the targeting sequence serving as the targeting portion of the CRISPR complex. When the molecule having the targeting sequence is present contemporaneously with the CRISPR molecule, the RNA molecule, alone or in combination with an additional one or more RNA molecules (e.g. a tracrRNA molecule), is capable of targeting the CRISPR nuclease to the specific target sequence. As non-limiting example, a guide sequence portion of a CRISPR RNA molecule or single-guide RNA molecule may serve as a targeting molecule. Each possibility represents a separate embodiment. A targeting sequence can be custom designed to target any desired sequence.

[0022] The term “targets” as used herein, refers to preferentially hybridizing a targeting sequence of a targeting molecule to a nucleic acid having a targeted nucleotide sequence. It is understood that the term “targets” encompasses variable hybridization efficiencies, such that there is preferential targeting of the nucleic acid having the targeted nucleotide sequence, but unintentional off-target hybridization in addition to on-target hybridization might also occur. It is understood that where an RNA molecule targets a sequence, a complex of the RNA molecule and a CRISPR nuclease molecule targets the sequence for nuclease activity.

[0023] The “guide sequence portion” of an RNA molecule refers to a nucleotide sequence that is capable of hybridizing to a specific target DNA sequence, e.g., the guide sequence portion has a nucleotide sequence which is partially or fully complementary to the DNA sequence being targeted along the length of the guide sequence portion. In some embodiments, the guide sequence portion is 17, 18, 19, 20, 21, 22, 23, 24, 25, 26, 27, 28, 29, 30, 31, 32, 33, 34, 35, 36, 37, 38, 39, 40, 41, 42, 43, 44, 45, 46, 47, 48, 49 or 50 nucleotides in length, or approximately 17-50, 17-49, 17-48, 17-47, 17-46, 17-45, 17-44, 17-43, 17-42, 17-41, 17-40, 17-39, 17-38, 17-37, 17-36, 17-35, 17-34, 17-33, 17-31, 17-30, 17-29, 17-28, 17-27, 17-26, 17-25, 17-24, 17-22, 17-21, 18-25, 18-24, 18-23, 18-22, 18-21, 19-25, 19-24, 19-23, 19-22, 19-21, 19-20, 20-22, 18-20, 20-21, 21-22, or 17-20 nucleotides in length. The entire length of the guide sequence portion is fully complementary to the DNA sequence being targeted along the length of the guide sequence portion. The guide sequence portion may be part of an RNA molecule that can form a complex with a CRISPR nuclease with the guide sequence portion serving as the DNA targeting portion of the CRISPR complex. When the RNA molecule having the guide sequence portion is present contemporaneously with the CRISPR molecule, alone or in combination with an additional one or more RNA molecules (e.g. a tracrRNA molecule), the RNA molecule is capable of targeting the CRISPR nuclease to the specific target

[0024] DNA sequence. Accordingly, a CRISPR complex can be formed by direct binding of the RNA molecule having the guide sequence portion to a CRISPR nuclease or by binding of the RNA molecule having the guide sequence portion and an additional one or more RNA molecules to the CRISPR nuclease. Each possibility represents a separate embodiment. A guide sequence portion can be custom designed to target any desired sequence. Accordingly, a molecule comprising a “guide sequence portion” is a type of targeting molecule. In some embodiments, the guide sequence portion comprises a sequence that is the same as, or differs by no more than 1, 2, 3, 4, or 5 nucleotides from, a guide sequence portion described herein, e.g., a guide sequence set forth in any of SEQ ID NOs: 1-13457. Each possibility represents a separate embodiment. In some of these embodiments, the guide sequence portion comprises a sequence that is the same as a sequence set forth in any of SEQ ID NOs: 1-13457. Throughout this application, the terms “guide molecule,” “RNA guide molecule.” “guide RNA molecule,” and “gRNA molecule” are synonymous with a molecule comprising a guide sequence portion.

[0025] The term “non-discriminatory” as used herein refers to a guide sequence portion of an RNA molecule that targets a specific DNA sequence that is common to all alleles of a gene.

[0026] In embodiments of the present invention, an RNA molecule targeting SARM1 comprises a guide sequence portion having 17-50 contiguous nucleotides containing nucleotides in the sequence set forth in any one of SEQ ID NOs: 1-13457. The RNA molecule and or the guide sequence portion of the RNA molecule may contain modified nucleotides. Exemplary modifications to nucleotides/polynucleotides may be synthetic and encompass polynucleotides which contain nucleotides comprising bases other than the naturally occurring adenine, cytosine, thymine, uracil, or guanine bases. Modifications to polynucleotides include polynucleotides which contain synthetic, non-naturally occurring nucleosides e.g., locked nucleic acids. Modifications to polynucleotides may be utilized to increase or decrease stability of an RNA. An example of a modified polynucleotide is an mRNA containing 1-methyl pseudo-uridine. For examples of modified polynucleotides and their uses, see U.S. Pat. No. 8,278,036, PCT International Publication No. WO/2015/006747, and Weissman and Kariko (2015), each of which is hereby incorporated by reference.

[0027] As used herein, “contiguous nucleotides” set forth in a SEQ ID NO refers to nucleotides in a sequence of nucleotides in the order set forth in the SEQ ID NO without any intervening nucleotides.

[0028] In embodiments of the present invention, a guide sequence portion of an RNA molecule targeting SARM1 may be 50 nucleotides in length and contain 20-22 contiguous nucleotides in the sequence set forth in any one of SEQ ID NOs: 1-13457. In embodiments of the present invention, the guide sequence portion may be less than 22 nucleotides in length. For example, in embodiments of the present invention the guide sequence portion may be 17, 18, 19, 20, or 21 nucleotides in length. In such embodiments the guide sequence portion may consist of 17, 18, 19, 20, or 21 nucleotides, respectively, in the sequence of 17-22 contiguous nucleotides set forth in any one of SEQ ID NOs: 1-13457. For example, a guide sequence portion having 17 nucleotides in the sequence of 17 contiguous nucleotides set forth in SEQ ID NO: 13458 may consist of any one of the following nucleotide sequences (nucleotides excluded from the contiguous sequence are marked in strike-through):

(SEQ ID NO: 13458)
AAAAAAAUGUACUUGGUUCC
17 nucleotide guide sequence 1:
(SEQ ID NO: 13459) [symbol]
AAAAUGUACUUGGUUCC
17 nucleotide guide sequence 2:
(SEQ ID NO: 13460) [symbol]
AAAAAUGUACUUGGUUC [symbol]
17 nucleotide guide sequence 3:
(SEQ ID NO: 13461) [symbol]
AAAAAAUGUACUUGGUU [symbol]
17 nucleotide guide sequence 4:
(SEQ ID NO: 13462)
AAAAAAAUGUACUUGGU

[symbol]

[0029] In embodiments of the present invention, the guide sequence portion may be greater than 20 nucleotides in length. For example, in embodiments of the present invention the guide sequence portion may be 21, 22, 23, 24 or 25 nucleotides in length. In such embodiments the guide sequence portion comprises 17-50 nucleotides containing the sequence of 20, 21 or 22 contiguous nucleotides set forth in any one of SEQ ID NOs: 1-13457 and additional nucleotides fully complimentary to a nucleotide or sequence of nucleotides adjacent to the 3′ end of the target sequence, 5′ end of the target sequence, or both.

[0030] In embodiments of the present invention, a CRISPR nuclease and an RNA molecule comprising a guide sequence portion form a CRISPR complex that binds to a target DNA sequence to effect cleavage of the target DNA sequence. CRISPR nucleases, e.g. Cpf1, may form a CRISPR complex comprising a CRISPR nuclease and RNA molecule without a further tracrRNA molecule. Alternatively, CRISPR nucleases, e.g. Cas9, may form a CRISPR complex between the CRISPR nuclease, an RNA molecule, and a tracrRNA molecule. A guide sequence portion, which comprises a nucleotide sequence that is capable of hybridizing to a specific target DNA sequence, and a sequence portion that participates in CRIPSR nuclease binding, e.g. a tracrRNA sequence portion, can be located on the same RNA molecule. Alternatively, a guide sequence portion may be located on one RNA molecule and a sequence portion that participates in CRIPSR nuclease binding, e.g. a tracrRNA portion, may located on a separate RNA molecule. A single RNA molecule comprising a guide sequence portion (e.g. a DNA-targeting RNA sequence) and at least one CRISPR protein-binding RNA sequence portion (e.g. a tracrRNA sequence portion), can form a complex with a CRISPR nuclease and serve as the DNA-targeting molecule. In some embodiments, a first RNA molecule comprising a DNA-targeting RNA portion, which includes a guide sequence portion, and a second RNA molecule comprising a CRISPR protein-binding RNA sequence interact by base pairing to form an RNA complex that targets the CRISPR nuclease to a DNA target site or, alternatively, are fused together to form an RNA molecule that complexes with the CRISPR nuclease and targets the CRISPR nuclease to a DNA target site.

[0031] In embodiments of the present invention, an RNA molecule comprising a guide sequence portion may further comprise the sequence of a tracrRNA molecule. Such embodiments may be designed as a synthetic fusion of the guide portion of the RNA molecule and the trans-activating crRNA (tracrRNA). (See Jinek et al., 2012). In such an embodiment, the RNA molecule is a single-guide RNA (sgRNA) molecule. Embodiments of the present invention may also form CRISPR complexes utilizing a separate tracrRNA molecule and a separate RNA molecule comprising a guide sequence portion. In such embodiments the tracrRNA molecule may hybridize with the RNA molecule via basepairing and may be advantageous in certain applications of the invention described herein.

[0032] The term “tracr mate sequence” refers to a sequence sufficiently complementary to a tracrRNA molecule so as to hybridize to the tracrRNA via basepairing and promote the formation of a CRISPR complex. (See U.S. Pat. No. 8,906,616). In embodiments of the present invention, the RNA molecule may further comprise a portion having a tracr mate sequence.

[0033] A “gene,” for the purposes of the present disclosure, includes a DNA region encoding a gene product, as well as all DNA regions which regulate the production of the gene product, whether or not such regulatory sequences are adjacent to coding and/or transcribed sequences. Accordingly, a gene includes, but is not necessarily limited to, promoter sequences, terminators, translational regulatory sequences such as ribosome binding sites and internal ribosome entry sites, enhancers, silencers, insulators, boundary elements, replication origins, matrix attachment sites and locus control regions.

[0034] “Eukaryotic” cells include, but are not limited to, fungal cells (such as yeast), plant cells, animal cells, mammalian cells and human cells.

[0035] The term “nuclease” as used herein refers to an enzyme capable of cleaving the phosphodiester bonds between the nucleotide subunits of nucleic acid. A nuclease may be isolated or derived from a natural source. The natural source may be any living organism. Alternatively, a nuclease may be a modified or a synthetic protein which retains the phosphodiester bond cleaving activity. Gene modification can be achieved using a nuclease, for example a CRISPR nuclease.

[0036] Any one of, or combination of, any strategy for reducing or deactivating SARM1 expression in cells for use in cell therapy may be used in the context of the invention.

[0037] According to embodiments of the present invention, there is provided a method for adoptive cell therapy or prophylaxis comprising administering SARM1-inhibited or SARM1-inactivated cells to a subject suffering from or determined to be at risk of suffering from a cancer, infection, disease, or disorder.

[0038] In some embodiments, the SARM1-inhibited or SARM1-inactivated cells are modified to have reduced or inactivated expression of SARM1, or the cells are modified to express a dominant negative SARM1 sequence variant or dominant negative fragment thereof.

[0039] In some embodiments, the cells are selected from the group consisting of hematopoietic stem cells (HSCs), induced pluripotent stem cells (iPS cells), iPSc-derived cells, natural killer cells (NKs), iPS-derived NK cells (iNKs), T cells, innate-like T cells (iTs), natural killer T cells (NKTs), γδ T cells, iPSc-derived T cells, invariant NKT cells (iNKTs), iPSc-derived NKTs, monocytes, or macrophages. In some embodiments, progenitor cells are first modified and then differentiated to create the SARM1-inhibited or SARM1-inactivated cells. Alternatively, the SARM1-inhibited or SARM1-inactivated cells may be created by directly editing cells, e.g. primary NK cells.

[0040] In some embodiments, the SARM1-inhibited or SARM1-inactivated cells display increased functionality relative to counterpart cells that have wild-type or unmodified SARM1 expression. In some embodiments, the SARM1-inhibited or SARM1-inactivated cells display increased and/or enhanced viability relative to counterpart cells that have wild-type or unmodified SARM1 expression. In some embodiments, the SARM1-inhibited or SARM1-inactivated cells display enhanced functionality in vivo, such as killing ability, cytotoxicity, trafficking, localization, persistence, and/or proliferation relative to counterpart cells that have wild-type or unmodified SARM1 expression.

[0041] In some embodiments, the SARM1-inhibited or SARM1-inactivated cells display increased functionality, increased viability, increased persistence, increased proliferation, and/or increased tumor retention in the subject relative to counterpart cells that have wild-type or unmodified SARM1 expression.

[0042] In some embodiments, the SARM1-inhibited or SARM1-inactivated cells display increased cytotoxic activity and/or increased killing activity in the subject relative to counterpart cells that have wild-type or unmodified SARM1 expression. For example, in some embodiments a SARM1-inhibited or SARM1-inactivated cell displays higher killing activity of a target cancel relative to a counterpart cell that has wild-type or unmodified SARM1 expression.

[0043] In some embodiments, the subject is suffering from or determined to be at risk of suffering from a cancer.

[0044] In some embodiments, the cancer comprises a tumor and/or the cancer is a hematological malignancy.

[0045] In some embodiments, the cancer is selected from the group consisting of static melanoma, metastatic prostate cancer, metastatic breast cancer, triple negative breast cancer, bladder cancer, brain cancer, esophageal cancer, liver cancer, head and neck cancer, squamous cell lung cancer, non-small lung cell cancer, Merkel cell carcinoma, sarcoma, hepatocellular cancer, multiple myeloma, leukemia, non-Hodgkin's lymphoma, lymphoma, B cell lymphoma, acute myeloid leukemia, pancreatic cancer, colorectal carcinoma, cervical cancer, gastric carcinoma, kidney cancer, metastatic renal cell carcinoma, leukemia, ovarian cancer, and malignant glioma.

[0046] In some embodiments, the SARM1-inhibited or SARM1-inactivated cells are created ex vivo or in vitro.

[0047] some embodiments, the SARM1-inhibited or SARM1-inactivated cells are created in vivo.

[0048] In some embodiments, the SARM1-inhibited or SARM1-inactivated cells are created from cells obtained from the subject by mobilization and/or by apheresis.

[0049] In some embodiments, the cells are obtained the cells from the subject by bone marrow aspiration.

[0050] In some embodiments, the cells are prestimulated prior to the SARM1 inhibition or SARM1 inactivation of the cells.

[0051] In some embodiments, the SARM1-inhibited or SARM1-inactivated cells are culture expanded prior to administration to the subject.

[0052] In some embodiments, the SARM1-inhibited or SARM1-inactivated cells are capable of engraftment.

[0053] In some embodiments, the SARM1-inhibited or SARM1-inactivated cells are capable of giving rise to progeny cells.

[0054] In some embodiments, the SARM1-inhibited or SARM1-inactivated cells are capable of giving rise to progeny cells after an engraftment.

[0055] In some embodiments, the SARM1-inhibited or SARM1-inactivated cells are capable of giving rise to progeny cells after an autologous engraftment.

[0056] In some embodiments, the SARM1-inhibited or SARM1-inactivated cells are capable of giving rise to progeny cells for at least 12 months or at least 24 months after engraftment.

[0057] In some embodiments, the SARM1-inhibited or SARM1-inactivated cells are created by delivering a gapmer, shRNA, siRNA, a customized TALEN, meganuclease, zinc finger nuclease, CRISPR nuclease, or a small molecule inhibitor to cells.

[0058] In some embodiments, alleles of the SARM1 gene in the SARM1-inhibited or SARM1-inactivated cells are subjected to an insertion or deletion mutation.

[0059] In some embodiments, the insertion or deletion mutation creates an early stop codon.

[0060] In some embodiments, SARM1-inhibited or SARM1-inactivated cells are created by a method comprising
[0061] introducing to the cells a composition comprising:
   [0062] at least one CRISPR nuclease, or a nucleotide molecule encoding a CRISPR nuclease; and
   [0063] an RNA molecule comprising a guide sequence portion, or a nucleotide molecule encoding the RNA molecule,
[0064] wherein a complex of the CRISPR nuclease and the RNA molecule affects a double strand break in alleles of the SARM1 gene,
[0065] wherein the guide sequence portion of the RNA molecule comprises 17-50 contiguous nucleotides.

[0066] In some embodiments, guide sequence portion is complementary to a target sequence located from 50 base pairs upstream to 50 base pairs downstream of Exon I, Exon II, Exon III, Exon IV, Exon V, Exon VI, Exon VII, Exon VIII, or Exon IX of the SARM1 gene.

[0067] In some embodiments, the guide sequence portion is complementary to a target sequence located from 30 base pairs upstream to 30 base pairs downstream of an Exon of the SARM1 gene, and
[0068] a) the Exon is Exon I and the guide sequence portion comprises a sequence that is the same as or differs by no more than 3 nucleotides from a sequence set forth in any of SEQ ID NOs: 1-56, 301-356, 1348-2223, 57-114, 357-414, 2224-3095, 115-174,415-474, 3096-3963;
[0069] b) the Exon is Exon II, and the guide sequence portion comprises a sequence that is the same as or differs by no more than 3 nucleotides from a sequence set forth in any of SEQ ID NOs: 3964-7683;
[0070] c) the Exon is Exon III, and the guide sequence portion comprises a sequence that is the same as or differs by no more than 3 nucleotides from a sequence set forth in any of SEQ ID NOs: 7684-8967;
[0071] d) the Exon is Exon IV, and the guide sequence portion comprises a sequence that is the same as or differs by no more than 3 nucleotides from a sequence set forth in any of SEQ ID NOs: 8968-9525;
[0072] e) the Exon is Exon V, and the guide sequence portion comprises a sequence that is the same as or differs by no more than 3 nucleotides from a sequence set forth in any of SEQ ID NOs: 9526-10947;
[0073] f) the Exon is Exon VI, and the guide sequence portion comprises a sequence that is the same as or differs by no more than 3 nucleotides from a sequence set forth in any of SEQ ID NOs: 10948-11571;
[0074] g) the Exon is Exon VII, and the guide sequence portion comprises a sequence that is the same as or differs by no more than 3 nucleotides from a sequence set forth in any of SEQ ID NOs: 11572-12717;
[0075] h) the Exon is Exon VIII, and the guide sequence portion comprises a sequence that is the same as or differs by no more than 3 nucleotides from a sequence set forth in any of SEQ ID NOs: 12718-13455; or
[0076] i) the Exon is Exon IX, and the guide sequence portion comprises a sequence that is the same as or differs by no more than 3 nucleotides from a sequence set forth in any of SEQ ID NOs: 598-1347.

[0077] In some embodiments, the guide sequence portion comprises 17-50 contiguous nucleotides containing nucleotides in the sequence set forth in any one of SEQ ID NOs: 1-13457.

[0078] In some embodiments, the SARM1-inhibited or SARM1-inactivated cells exhibit increased viability and/or increased functionality compared to counterpart cells that have wild-type or unmodified SARM1 expression.

[0079] According to embodiments of the present invention, there is provided a medicament comprising SARM1-inhibited or SARM1-inactivated cells for use in treating or preventing a cancer, infection, disease, or disorder in a subject according to the methods presented herein. In some embodiments, the present invention provides a kit for treating or preventing a cancer, infection, disease, or disorder in a subject, comprising the medicament and instructions for delivering the composition to a subject suffering from or determined to be at risk of suffering from a cancer, infection, disease, or disorder.

[0080] According to embodiments of the present invention, there is provided a method for inactivating alleles of the sterile alpha and toll/interleukin-1 receptor motif-containing 1 (SARM1) gene in a cell, the method comprising
[0081] introducing to the cell a composition comprising:
   [0082] at least one CRISPR nuclease, or a nucleotide molecule encoding a CRISPR nuclease; and
   [0083] an RNA molecule comprising a guide sequence portion, or a nucleotide molecule encoding the RNA molecule,
[0084] wherein a complex of the CRISPR nuclease and the RNA molecule affects a double strand break in alleles of the SARM1 gene,
[0085] wherein the guide sequence portion comprises 17-50 contiguous nucleotides containing nucleotides in the sequence set forth in any one of SEQ ID NOs: 1-13457, and
[0086] wherein the cell is selected from the group consisting of a hematopoietic stem cell (HSC), induced pluripotent stem cell (iPS cell), iPSc-derived cell, natural killer cell (NK), iPS-derived NK cell (iNK), T cell, innate-like T cell (iT), natural killer T cell (NKT), γδ T cell, iPSc-derived T cell, invariant NKT cell (iNKT), iPSc-derived NKT, monocyte, or macrophage.

[0087] According to embodiments of the present invention, there is provided a cell modified by the method for inactivating alleles of the SARM1 gene in a cell, wherein the modified cell comprises at least one inactivated SARM1 allele.

[0088] In some embodiments, the modified cell comprises two inactivated SARM1 alleles. In some embodiments, the modified cell exhibits increased viability and/or increased functionality compared to a counterpart cell that has wild-type or unmodified SARM1 expression. In some embodiments, increased functionality comprises increased cytotoxicity and/or increased killing capability.

[0089] In some embodiments, the cell is for use in adoptive cell therapy or prophylaxis.

[0090] In some embodiments, the adoptive cell therapy or prophylaxis is to treat or prevent a cancer, infection, disease, or disorder in a subject.

[0091] According to embodiments of the present invention, there is provided a method of inactivating SARM1 expression in a cell by delivering an RNA molecule comprising a guide sequence portion (e.g. a targeting sequence) comprising a nucleotide sequence that is fully or partially complementary to a target sequence comprising a SNP position (REF/SNP sequence) located in or near an allele of the SARM1 gene. In some embodiments, the guide sequence portion of the RNA molecule consists of 16, 17, 18, 19, 20, 21, 22, 23, 24, 25, 26, or more than 26 nucleotides. In some embodiments the guide sequence portion is configured to target a CRISPR nuclease to a target sequence and provide a cleavage event, by a CRISPR nuclease complexed therewith, selected from a double-strand break and a single-strand break within 500, 400, 300, 200, 100, 50, 25, or 10 nucleotides of a SARM1 target site. In some embodiments, the cleavage event enables non-sense mediated decay of the SARM1 gene. In some embodiments, the RNA molecule is a guide RNA molecule such as a crRNA molecule or a single-guide RNA molecule.

[0092] In some embodiments, the target sequence of an allele of SARM1 gene is altered (e.g., by introduction of an NHEJ-mediated indel (e.g., insertion or deletion), and results in reduction or elimination of expression of the gene product encoded by the allele of SARM1 gene. In some embodiments, the reduction or elimination of expression is due to non-sense mediated mRNA decay such as due to immature stop codon. In some embodiments, the reduction or elimination of expression is due to expression of a truncated form of the SARM1 gene product. In some embodiments, the guide sequence portion is complementary to a target sequence comprising a SNP position. In some embodiments, the SNP position is rs782593684. In some embodiments, the guide sequence portion comprises a sequence that is the same as or differs by no more than 1, 2, or 3 nucleotides from a sequence set forth in any of SEQ ID NOs: 1-174. In some embodiments, the guide sequence portion comprises a sequence that is the same as or differs by no more than 1, 2, or 3 nucleotides from a sequence set forth in any of SEQ ID NOs: 1, 4, 8, 20, 24, 26-27, 33, 35, 37, 41, 47, 49, 51, 53, 56, 175-214, 57, 60, 64, 76, 80, 82-83, 92, 94, 98, 102, 105, 107, 109, 111, 114, 215-256, 115, 118, 122, 132, 139, 141-142, 151, 157, 161, 164-165, 167, 169, 171, 174, and 257-300. Each possibility represents a separate embodiment. In some embodiments, the SNP position 17:28372349_C_CT. In some embodiments, the guide sequence portion comprises a sequence that is the same as or differs by no more than 1, 2, or 3 nucleotides from a sequence set forth in any of SEQ ID NOs: 301-474. In some embodiments, the guide sequence portion comprises a sequence that is the same as or differs by no more than 1, 2, or 3 nucleotides from a sequence set forth in any of SEQ ID NOs: 301, 304, 315, 321, 326-328, 335, 338, 340, 344, 346-348, 353, 355-356, 475-513, 357, 361, 364, 368, 373, 384-385, 393, 396, 398, 402, 404-406, 411, 413-414, 514-554, 415-416, 419, 422, 424, 427, 432, 443-444, 458, 462, 464-466, 471, 473-474, and 555-597. Each possibility represents a separate embodiment.

[0093] According to embodiments of the present invention, there is provided an RNA molecule, or a sequence encoding the RNA molecule, wherein the RNA molecule comprises a guide sequence portion (e.g. a targeting sequence) comprising a nucleotide sequence that is fully or partially complementary to a target sequence located in or near the SARM1 gene. In some embodiments, the guide sequence portion is complementary to a target sequence located from 30 base pairs upstream to 30 base pairs downstream of Exon I, Exon II, Exon III, Exon IV, Exon V, Exon VI, Exon VII, Exon VIII, or Exon IX of the SARM1 gene. In some embodiments, the guide sequence portion is complementary to a target sequence located from 50 base pairs upstream to 50 base pairs downstream of Exon I, Exon II, Exon III, Exon IV, Exon V, Exon VI, Exon VII, Exon VIII, or Exon IX of the SARM1 gene. Each possibility represents a separate embodiment. In some embodiments, the target sequence of SARM1 gene is altered (e.g., by introduction of an NHEJ-mediated indel (e.g., insertion or deletion), and results in reduction or elimination of expression of the gene product encoded by the SARM1 gene. In some embodiments, the reduction or elimination of expression is due to non-sense mediated mRNA decay. In some embodiments, the guide sequence portion of the RNA molecule consists of 16, 17, 18, 19, 20, 21, 22, 23, 24, 25, 26, or more than 26 nucleotides. In some embodiments the guide sequence portion is configured to target a CRISPR nuclease to a target sequence and provide a cleavage event, by a CRISPR nuclease complexed therewith, selected from a double-strand break and a single-strand break within 500, 400, 300, 200, 100, 50, 25, or 10 nucleotides of a SARM1 target site. In some embodiments, the cleavage event enables non-sense mediated decay of the SARM1 gene. In some embodiments, the RNA molecule is a guide RNA molecule such as a crRNA molecule or a single-guide RNA molecule.

[0094] In some embodiments, the guide sequence portion is complementary to a target sequence located from 30 base pairs upstream to 30 base pairs downstream of an Exon of the SARM1 gene. In some embodiments, the guide sequence portion is complementary to a target sequence located from 50 base pairs upstream to 50 base pairs downstream of an Exon of the SARM1 gene. In some embodiments, the guide sequence portion is complementary to a target sequence located from 7 base pairs upstream to 7 base pairs downstream of an Exon of the SARM1 gene. In some embodiments, the Exon is Exon I and the guide sequence portion comprises a sequence that is the same as or differs by no more than 3 nucleotides from a sequence set forth in any of SEQ ID NOs: 1-56, 301-356, 1348-2223, 57-114, 357-414, 2224-3095, 115-174, 415-474, and 3096-3963. In some embodiments, the Exon is Exon II, and the guide sequence portion comprises a sequence that is the same as or differs by no more than 3 nucleotides from a sequence set forth in any of SEQ ID NOs: 3964-7683. In some embodiments, the Exon is Exon III, and the guide sequence portion comprises a sequence that is the same as or differs by no more than 3 nucleotides from a sequence set forth in any of SEQ ID NOs: 7684-8967. In some embodiments, the Exon is Exon IV, and the guide sequence portion comprises a sequence that is the same as or differs by no more than 3 nucleotides from a sequence set forth in any of SEQ ID NOs: 8968-9525. In some embodiments, the Exon is Exon V, and the guide sequence portion comprises a sequence that is the same as or differs by no more than 3 nucleotides from a sequence set forth in any of SEQ ID NOs: 9526-10947. In some embodiments, the Exon is Exon VI, and the guide sequence portion comprises a sequence that is the same as or differs by no more than 3 nucleotides from a sequence set forth in any of SEQ ID NOs: 10948-11571. In some embodiments, the Exon is Exon VII, and the guide sequence portion 30) comprises a sequence that is the same as or differs by no more than 3 nucleotides from a sequence set forth in any of SEQ ID NOs: 11572-12717. In some embodiments, the Exon is Exon VIII, and the guide sequence portion comprises a sequence that is the same as or differs by no more than 3 nucleotides from a sequence set forth in any of SEQ ID NOs: 12718-13455. In some embodiments, the Exon is Exon IX, and the guide sequence portion comprises a sequence that is the same as or differs by no more than 3 nucleotides from a sequence set forth in any of SEQ ID NOs: 598-1347.

[0095] In embodiments of the present invention, an RNA molecule is used to direct a CRISPR nuclease to an exon or a splice site of a SARM1 allele in order to create a double-stranded break (DSB), leading to insertion or deletion of nucleotides by inducing an error-prone non-homologous end-joining (NHEJ) mechanism and formation of a frameshift mutation in the SARM1 allele. The frameshift mutation may result in, for example, inactivation or knockout of the SARM1 allele by generation of an early stop codon in the SARM1 allele and to generation of a truncated protein or to nonsense-mediated mRNA decay of the transcript of the allele. In further embodiments, one RNA molecule is used to direct a CRISPR nuclease to a promotor of a SARM1 allele. CRISPR compositions used to inactivate SARM1 alleles as described herein may include at least one CRISPR nuclease, RNA molecule(s), and a tracrRNA molecule, being effective in a subject or cells at the same time. The at least one CRISPR nuclease, RNA molecule(s), and tracrRNA may be delivered substantially at the same time or can be delivered at different times but have effect at the same time. For example, this includes delivering the CRISPR nuclease to the subject or cells before the RNA molecule and/or tracrRNA is substantially extant in the subject or cells.

[0096] According to some aspects, there is provided a SARM1-inhibited or a SARM1-inactivated cell. In some embodiments, the cell is an immune cell (e.g., monocyte, macrophage, lymphocyte, natural killer cell (NK), iPS-derived NK cell (iNK), T cell, innate-like T cell (iT), iPS-derived T cell, natural killer T cell (NKT), invariant NKT cell (iNKT), or iPS-derived NKT cell). In some embodiments, the SARM1-inhibited cell is a stem cell, HSC, or iPSc. Each possibility represents a separate embodiment. The SARM1-inhibited or SARM1-inactivated cell (e.g., immune cells) may be generated by utilizing any suitable SARM1 inhibitor including a peptide, a polypeptide, a protein, a nuclease, a small molecule, or a polynucleotide.

[0097] In some embodiments, the SARM1-inhibited or SARM1-inactivated cell is genetically modified to have reduced activity of SARM1. In some embodiments, the SARM1-inhibited or SARM1-inactivated cell is derived from a precursor cell that was genetically modified to have reduced activity of SARM1. In a non-limiting example, SARM1-inhibited iNK is derived from iPSc that was genetically modified to have reduced activity of SARM1 such as by utilizing CRISPR to knockout SARM1 alleles and further differentiated into an iNK cell.

[0098] In some embodiments, the SARM1-inhibited or SARM1-inactivated cells, or cells derived therefrom are used for cell therapy. In some embodiments, the SARM1-inhibited cells, or cells derived therefrom are used for immunotherapy.

[0099] According to some aspects of the present disclosure, provided herein is a method for increasing cell viability and/or cell functionality by inactivating alleles of the sterile alpha and toll/interleukin-1 receptor motif-containing 1 (SARM1) gene in a cell, the method comprising introducing to the cell a composition comprising: a CRISPR nuclease, or a nucleotide molecule encoding a CRISPR nuclease, and an RNA molecule comprising a guide sequence portion 17-50 contiguous nucleotides containing nucleotides in the sequence set forth in any one of SEQ ID NOS: 1-13457, or a nucleotide molecule encoding the RNA molecule, wherein a complex of the CRISPR nuclease and the RNA molecule affects a double strand break in alleles of the SARM1 gene. Non-limiting examples of cell types which may be modified by this method include, but are not limited to, liver cells (e.g., hepatocytes), lung cells, spleen cells, pancreas cells, colon cells, skin cells, bladder cells, eye cells, ocular cells, retinal cells, corneal cells, brain cells, esophagus cells, cells of the head, cells of the neck, cells of the ovary, cells of the testes, prostate cells, placenta cells, epithelial cells, endothelial cells, adipocyte cells, kidney/renal cells, heart cells, muscle cells, blood cells (e.g., white blood cells), immune cells, central nervous system (CNS) cells, ganglion cells, and the like, as well as combinations of the foregoing.

### SARM1 Editing Strategies

[0100] The provided methods to knockout SARM1 alleles in a cell may be used to create SARM1 inactivated cells for use in cell therapy or immunotherapy.

[0101] SARM1 editing strategies include, but are not limited to: (1) Biallelic knockout by targeting any one of, or a combination of, Exons 2-9, including within seven nucleotides upstream and downstream of the exons to flank splice donor and acceptor sites, as frameshifts in these exons lead to non-functional, truncated SARM1 proteins or non-sense mediated decay of the mutated SARM1 transcripts; and (2) Truncation of SARM1 protein by mediating indels in Exon 1 upstream to or overlapping the second methionine codon in the exon that would eliminate it and thus prevent re-initiation of translation, or by disrupting a splice donor by targeting Exon 1-Intron 1 junction. CRISPR Nucleases and PAM Recognition

[0102] In some embodiments, the sequence specific nuclease is selected from CRISPR nucleases, or is a functional variant thereof. In some embodiments, the sequence specific nuclease is an RNA-guided DNA nuclease. In such embodiments. the RNA sequence which guides the RNA-guided DNA nuclease (e.g., Cpf1) binds to and/or directs the RNA-guided DNA nuclease to all SARM1 alleles in a cell. In some embodiments, the CRISPR complex does not further comprise a tracrRNA. In a non-limiting example, in which the RNA-guided DNA nuclease is a CRISPR protein, the at least one nucleotide which differs between the dominant SARM1 allele and the functional allele may be within the PAM site and/or proximal to the PAM site within the region that the RNA molecule is designed to hybridize to. A skilled artisan will appreciate that RNA molecules can be engineered to bind to a target of choice in a genome by commonly known methods in the art.

[0103] The term “PAM” as used herein refers to a nucleotide sequence of a target DNA located in proximity to the targeted DNA sequence and recognized by the CRISPR nuclease complex. The PAM sequence may differ depending on the nuclease identity. In addition. there are CRISPR nucleases that can target almost all PAMs. In some embodiments of the present invention, a CRISPR system utilizes one or more RNA molecules having a guide sequence portion to direct a CRISPR nuclease to a target DNA site via Watson-Crick base-pairing between the guide sequence portion and the protospacer on the target DNA site, which is next to the protospacer adjacent motif (PAM), which is an additional requirement for target recognition. The CRISPR nuclease then mediates cleavage of the target DNA site to create a double-stranded break within the protospacer. In a non-limiting example, a type II CRISPR system utilizes a mature crRNA:tracrRNA complex that directs the CRISPR nuclease, e.g. Cas9 to the target DNA the target DNA via Watson-Crick base-pairing between the guide sequence portion of the crRNA and the protospacer on the target DNA next to the protospacer adjacent motif (PAM). A skilled artisan will appreciate that each of the engineered RNA molecule of the present invention is further designed such as to associate with a target genomic DNA sequence of interest next to a protospacer adjacent motif (PAM), e.g., a PAM matching the sequence relevant for the type of CRISPR nuclease utilized, such as for a non-limiting example, NGG or NAG, wherein “N” is any nucleobase, for Streptococcus pyogenes Cas9 WT (SpCAS9); NNGRRT for Staphylococcus aureus (SaCas9); NNNVRYM for Jejuni Cas9 WT; NGAN or NGNG for SpCas9-VQR variant; NGCG for SpCas9-VRER variant; NGAG for SpCas9-EQR variant; NRRH for SpCas9-NRRH variant, wherein N is any nucleobase, R is A or G and H is A, C, or T; NRTH for SpCas9-NRTH variant, wherein N is any nucleobase, R is A or G and H is A, C, or T; NRCH for SpCas9-NRCH variant, wherein N is any nucleobase, R is A or G and H is A, C, or T; NG for SpG variant of SpCas9 wherein N is any nucleobase; NG or NA for SpCas9-NG variant of SpCas9 wherein N is any nucleobase; NR or NRN or NYN for SpRY variant of SpCas9, wherein N is any nucleobase, R is A or G and Y is C or T; NNG for Streptococcus canis Cas9 variant (ScCas9), wherein N is any nucleobase; NNNRRT for SaKKH-Cas9 variant of Staphylococcus aureus (SaCas9), wherein N is any nucleobase, and R is A or G; NNNNGATT for Neisseria meningitidis (NmCas9), wherein N is any nucleobase; TTN for Alicyclobacillus acidiphilus Cas12b (AacCas12b), wherein N is any nucleobase; or TTTV for Cpf1, wherein V is A, C or G. RNA molecules of the present invention are each designed to form complexes in conjunction with one or more different CRISPR nucleases and designed to target polynucleotide sequences of interest utilizing one or more different PAM sequences respective to the CRISPR nuclease utilized.

[0104] In some embodiments, an RNA-guided DNA nuclease e.g., a CRISPR nuclease, may be used to cause a DNA break, either double or single-stranded in nature, at a desired location in the genome of a cell. The most commonly used RNA-guided DNA nucleases are derived from CRISPR systems, however, other RNA-guided DNA nucleases are also contemplated for use in the genome editing compositions and methods described herein. For instance, see U.S. Publication No. 2015/0211023, the entire content of which is incorporated by reference.

[0105] CRISPR systems that may be used in the practice of the invention vary greatly. CRISPR systems can be a type I, a type II, or a type III system. Non-limiting examples of suitable CRISPR proteins include Cas3, Cas4, Cas5, Case (or CasD), Cas6, Cas6e, Cas6f, Cas7, Cas8a1, Cas8a2,Cas8b, Cas8c, Cas9, Cas10, Cas1 Od, CasF, CasG, CasH, Csy1, Csy2, Csy3, Cse1 (or CasA), Cse2(or CasB), Cse3 (or CasE), Cse4 (or CasC), Csc1, Csc2, Csa5, Csn2, Csm2, Csm3, Csm4, Csm5,Csm6, Cmr1, Cmr3, Cmr4, Cmr5, Cmr6, Csb1, Csb2, Csb3, Csx17, Csx14, Csx10, Csx16, CsaX, Csx3, Csz1, Csx15, Csf1, Csf2, Csf3, Csf4, and Cu1966.

[0106] In some embodiments, the RNA-guided DNA nuclease is a CRISPR nuclease derived from a type II CRISPR system (e.g., Cas9). The CRISPR nuclease may be derived from Streptococcus pyogenes, Streptococcus thermophilus, Streptococcus sp., Staphylococcus aureus, Neisseria meningitidis, Treponema denticola, Nocardiopsis dassonvillei, Streptomyces pristinaespiralis, Streptomyces viridochromogenes, Streptomyces viridochromogenes, Streptosporangium roseum, Streptosporangium roseum, Alicyclobacillus acidocaldarius, Bacillus pseudomycoides, Bacillus selenitireducens, Exiguobacterium sibiricum, Lactobacillus delbrueckii, Lactobacillus salivarius, Microscilla marina, Burkholderiales bacterium, Polaromonas naphthalenivorans, Polaromonas sp., Crocosphaera watsonii, Cyanothece sp., Microcystis aeruginosa, Synechococcus sp., Acetohalobium arabaticum, Ammonifex degensii, Caldicelulosiruptor becscii, Candidatus Desulforudis, Clostridium botulinum, Clostridium difficile, Finegoldia magna, Natranaerobius thermophilus, Pelotomaculumthermopropionicum, Acidithiobacillus caldus, Acidithiobacillus ferrooxidans, Allochromatium vinosum, Marinobacter sp., Nitrosococcus halophilus, Nitrosococcus watsoni, Pseudoalteromonas haloplanktis, Ktedonobacter racemifer, Methanohalobium evestigatum, Anabaena variabilis, Nodularia spumigena, Nostoc sp., Arthrospira maxima, Arthrospira platensis, Arthrospira sp., Lyngbya sp., Microcoleus chthonoplastes, Oscillatoria sp., Petrotoga mobilis, Thermosipho africanus, Acaryochloris marina, or any species which encodes a CRISPR nuclease with a known PAM sequence. CRISPR nucleases encoded by uncultured bacteria may also be used in the context of the invention. (See Burstein et al. Nature, 2017). Variants of CRIPSR proteins having known PAM sequences e.g., SpCas9 D1135E variant, SpCas9 VQR variant, SpCas9 EQR variant, or SpCas9 VRER variant may also be used in the context of the invention.

[0107] Thus, an RNA-guided DNA nuclease of a CRISPR system, such as a Cas9 protein or modified Cas9 or homolog or ortholog of Cas9, or other RNA-guided DNA nucleases belonging to other types of CRISPR systems, such as Cpf1 and its homologs and orthologs, may be used in the compositions of the present invention. Additional CRISPR nucleases may also be used, for example, the nucleases described in PCT International Application Publication Nos. WO2020/223514 and WO2020/223553, the content of each of which are incorporated by reference.

[0108] In certain embodiments, the CRIPSR nuclease may be a “functional derivative” of a naturally occurring Cas protein. A “functional derivative” of a native sequence polypeptide is a compound having a qualitative biological property in common with a native sequence polypeptide. “Functional derivatives” include, but are not limited to, fragments of a native sequence and derivatives of a native sequence polypeptide and its fragments, provided that they have a biological activity in common with a corresponding native sequence polypeptide. A biological activity contemplated herein is the ability of the functional derivative to hydrolyze a DNA substrate into fragments. The term “derivative” encompasses both amino acid sequence variants of polypeptide, covalent modifications, and fusions thereof. Suitable derivatives of a Cas polypeptide or a fragment thereof include but are not limited to mutants, fusions, covalent modifications of Cas protein or a fragment thereof. Cas protein, which includes Cas protein or a fragment thereof, as well as derivatives of Cas protein or a fragment thereof, may be obtainable from a cell or synthesized chemically or by a combination of these two procedures. The cell may be a cell that naturally produces Cas protein, or a cell that naturally produces Cas protein and is genetically engineered to produce the endogenous Cas protein at a higher expression level or to produce a Cas protein from an exogenously introduced nucleic acid, which nucleic acid encodes a Cas that is same or different from the endogenous Cas. In some cases, the cell does not naturally produce Cas protein and is genetically engineered to produce a Cas protein.

[0109] In some embodiments, the CRISPR nuclease is Cpf1. Cpf1 is a single RNA-guided endonuclease which utilizes a T-rich protospacer-adjacent motif. Cpf1 cleaves DNA via a staggered DNA double-stranded break. Two Cpf1 enzymes from Acidaminococcus and Lachnospiraceae have been shown to carry out efficient genome-editing activity in human cells. (See Zetsche et al., 2015).

[0110] Thus, an RNA-guided DNA nuclease of a Type II CRISPR System, such as a Cas9 protein or modified Cas9 or homologs, orthologues, or variants of Cas9, or other RNA-guided DNA nucleases belonging to other types of CRISPR systems, such as Cpf1 and its homologs, orthologues, or variants, may be used in the present invention.

[0111] In some embodiments, the guide molecule comprises one or more chemical modifications which imparts a new or improved property (e.g., improved stability from degradation, improved hybridization energetics, or improved binding properties with an RNA-guided DNA nuclease). Suitable chemical modifications include, but are not limited to: modified bases, modified sugar moieties, or modified inter-nucleoside linkages. Non-limiting examples of suitable chemical modifications include: 4-acetylcytidine, 5-(carboxyhydroxymethyl)uridine, 2″-O-methylcytidine, 5-carboxy methylaminomethyl-2-thiouridine, 5-carboxymethylaminomethyluridine, dihydrouridine, 2′-O-methylpseudouridine, “beta, D-galactosylqueuosine”, 2′-O-methylguanosine, inosine, N6-isopentenyladenosine, 1-methyladenosine, 1-methylpseudouridine, 1-methylguanosine, 1-methylinosine, “2,2-dimethylguanosine”, 2-methyladenosine, 2-methylguanosine, 3-methylcytidine, 5-methylcytidine, N6-methyladenosine, 7-methylguanosine, 5-methylaminomethyluridine, 5-methoxyaminomethyl-2-thiouridine, “beta, D-mannosylqueuosine”, 5-methoxycarbonylmethyl-2-thiouridine, 5-methoxy carbonylmethyluridine, 5-methoxyuridine, 2-methylthio-N6-isopentenyladenosine, N-((9-beta-D-ribofuranosyl-2-methylthiopurine-6-yl)carbamoyl)threonine, N-((9-beta-D-ribofuranosylpurine-6-yl)N-methylcarbamoyl)threonine, uridine-5-oxyacetic acid-methylester, uridine-5-oxyacetic acid, wybutoxosine, queuosine, 2-thiocytidine, 5-methyl-2-thiouridine, 2-thiouridine, 4-thiouridine, 5-methyluridine, N-((9-beta-D-ribofuranosylpurine-6-yl)-carbamoyl)threonine, 2-O)-methyl-5-methyluridine, 2′-O-methyluridine, wybutosine, “3-(3-amino-3-carboxy-propyl)uridine, (acp3)u”, 2′-0-methyl (M), 3′-phosphorothioate (MS), 3′-thioPACE (MSP), pseudouridine, or 1-methyl pseudo-uridine. Each possibility represents a separate embodiment of the present invention.

[0112] In addition to targeting SARM1 alleles by a RNA-guided CRISPR nuclease, other means of inhibiting SARM1 expression in a target cell for use in cell therapy (e.g. a hematopoietic stem cell (HSC), induced pluripotent stem cells (iPS cells), natural killer cell (NK), iPSc-derived NK cell (iNK), T cell, innate-like T cell (iT), γδ T cells, iPSc-derived T cell, natural killer T cell (NKT), invariant NKT cell (iNKT), iPSc-derived NKT, monocyte, or macrophage), include but are not limited to use of a gapmer, shRNA, siRNA, a customized TALEN, meganuclease, or zinc finger nuclease, a small molecule inhibitor, and any other method known in the art for reducing or eliminating expression of a gene in a target cell. See, for example, U.S. Pat. Nos. 6,506,559; 7,560,438; 8,420,391; 8,552,171; 7,056,704; 7,078,196; 8,362,231; 8,372,968; 9,045,754; and PCT International Publication Nos. WO/2004/067736; WO/2006/097853; WO/2003/087341;WO/2000/0415661; WO/2003/080809; WO/2010/079430; WO/2010/079430; WO/2011/072246;WO/2018/057989; and WO/2017/164230, the entire content of each of which are incorporated by reference.

[0113] Advantageously, guide RNA molecules comprising at least one guide sequence portion presented herein provide improved SARM1 knockout efficiency when complexed with a CRISPR nuclease in a cell relative to other guide RNA molecules. These specifically designed sequences may also be useful for identifying SARM1 target sites for other nucleotide targeting-based gene-editing or gene-silencing methods, for example, siRNA, TALENs, meganucleases or zinc-finger nucleases.

### Delivery to Cells

[0114] Any one of the compositions described herein useful for reducing or eliminating the expression of SARM1 may be delivered to a target cell by any suitable means. RNA guide molecules used to target SARM1 in methods of the present invention may be delivered to any cell intended to be administered to a subject for the purposes of cell therapy, or give rise to such a cell, and which contains and/or expresses a SARM1 allele. For example, in one embodiment of the present invention, an RNA molecule that specifically targets SARM1 alleles is delivered to a target cell and the target cell is a hematopoietic stem cell (HSC), induced pluripotent stem cells (iPS cells), natural killer cell (NK), iPS-derived NK cell (iNK), T cell, innate-like T cell (iT), natural killer T cell (NKT), invariant NKT cell (iNKT), monocyte, or macrophage. The delivery to the cell may be performed in vivo, ex vivo, or in vitro. In some embodiments, the delivery to the cell is ex vivo or in vitro, such that the generated modified cell may be administered to a subject in need thereof. In some embodiments, the delivery to the cell is in vivo, such that modification of the cell occurs in the subject in need thereof. Further, the nucleic acid compositions described herein may be delivered to a cell as one or more of DNA molecules, RNA molecules, ribonucleoproteins (RNP), nucleic acid vectors, or any combination thereof.

[0115] In some embodiments, the RNA molecule comprises a chemical modification. Non-limiting examples of suitable chemical modifications include 2′-0-methyl (M), 2′-0-methyl, 3′phosphorothioate (MS) or 2′-0-methyl, 3′thioPACE (MSP), pseudouridine, and 1-methyl pseudo-uridine. Each possibility represents a separate embodiment of the present invention.

[0116] Any suitable viral vector system may be used to deliver nucleic acid compositions e.g., the RNA molecule compositions of the subject invention. Conventional viral and non-viral based gene transfer methods can be used to introduce nucleic acids and target tissues. In certain embodiments, nucleic acids are administered for in vivo or ex vivo gene therapy uses. Non-viral vector delivery systems include naked nucleic acid, and nucleic acid complexed with a delivery vehicle such as a liposome or poloxamer. For a review of gene therapy procedures, see Anderson (1992); Nabel & Felgner (1993); Mitani & Caskey (1993); Dillon (1993); Miller (1992); Van Brunt (1988); Vigne (1995); Kremer & Perricaudet (1995); Haddada et al. (1995); and Yu et al. (1994).

[0117] Methods of non-viral delivery of nucleic acids and/or proteins include electroporation, lipofection, microinjection, biolistics, particle gun acceleration, virosomes, liposomes, immunoliposomes, lipid nanoparticles (LNPs), polycation or lipid:nucleic acid conjugates, artificial virions, and agent-enhanced uptake of nucleic acids or can be delivered to plant cells by bacteria or viruses (e.g., Agrobacterium, Rhizobium sp. NGR234, Sinorhizoboiummeliloti, Mesorhizobium loti, tobacco mosaic virus, potato virus X, cauliflower mosaic virus and cassava vein mosaic virus). (See, e.g., Chung et al., 2006). Sonoporation using, e.g., the Sonitron 2000 system (Rich-Mar), can also be used for delivery of nucleic acids. Cationic-lipid mediated delivery of proteins and/or nucleic acids is also contemplated as an in vivo, ex vivo, or in vitro delivery method. (See Zuris et al. (2015); see also Coelho et al. (2013); Judge et al. (2006); and Basha et al. (2011)).

[0118] Non-viral vectors, such as transposon-based systems e.g. recombinant Sleeping Beauty transposon systems or recombinant PiggyBac transposon systems, may also be delivered to a target cell and utilized for transposition of a polynucleotide sequence of a molecule of the composition or a polynucleotide sequence encoding a molecule of the composition in the target cell.

[0119] Additional exemplary nucleic acid delivery systems include those provided by Amaxa.® Biosystems (Cologne, Germany), Maxcyte, Inc. (Rockville, Md.), BTX Molecular Delivery Systems (Holliston, Mass.) and Copernicus Therapeutics Inc., (see, e.g., U.S. Pat. No. 6,008,336). Lipofection is described in e.g., U.S. Pat. Nos. 5,049,386, 4,946,787; and 4,897,355, and lipofection reagents are sold commercially (e.g., Transfectam.™, Lipofectin.™ and Lipofectamine.™ RNAiMAX). Cationic and neutral lipids that are suitable for efficient receptor-recognition lipofection of polynucleotides include those disclosed in PCT International Publication Nos. WO/1991/017424 and WO/1991/016024. Delivery can be to cells (ex vivo administration) or target tissues (in vivo administration).

[0120] The preparation of lipid:nucleic acid complexes, including targeted liposomes such as immunolipid complexes, is well known to one of skill in the art (see, e.g., Crystal, Science (1995); Blaese et al., (1995); Behr et al., (1994); Remy et al. (1994); Gao and Huang (1995); Ahmad and Allen (1992); U.S. Pat. Nos. 4,186,183; 4,217,344; 4,235,871; 4,261,975; 4,485,054; 4,501,728; 4,774,085; 4,837,028; and 4,946,787).

[0121] Additional methods of delivery include the use of packaging the nucleic acids to be delivered into EnGeneIC delivery vehicles (EDVs). These EDVs are specifically delivered to target tissues using bispecific antibodies where one arm of the antibody has specificity for the target tissue and the other has specificity for the EDV. The antibody brings the EDVs to the target cell surface and then the EDV is brought into the cell by endocytosis. Once in the cell, the contents are released (See MacDiarmid et al., 2009).

[0122] The use of RNA or DNA viral based systems for viral mediated delivery of nucleic acids take advantage of highly evolved processes for targeting a virus to specific cells in the body and trafficking the viral payload to the nucleus. Viral vectors can be administered directly to patients (in vivo) or they can be used to treat cells in vitro and the modified cells are administered to patients (ex vivo). Conventional viral based systems for the delivery of nucleic acids include, but are not limited to, retroviral, lentivirus, adenoviral, adeno-associated, vaccinia and herpes simplex virus vectors for gene transfer.

[0123] The tropism of a retrovirus can be altered by incorporating foreign envelope proteins, expanding the potential target population of target cells. Lentiviral vectors are retroviral vectors that are able to transduce or infect non-dividing cells and typically produce high viral titers. Selection of a retroviral gene transfer system depends on the target tissue. Retroviral vectors are comprised of cis-acting long terminal repeats with packaging capacity for up to 6-10 kb of foreign sequence. The minimum cis-acting LTRs are sufficient for replication and packaging of the vectors, which are then used to integrate the therapeutic gene into the target cell to provide permanent transgene expression. Widely used retroviral vectors include those based upon murine leukemia virus (MuLV), gibbon ape leukemia virus (GaLV), Simian Immunodeficiency virus (SIV), human immunodeficiency virus (HIV), and combinations thereof (See, e.g., Buchschacher et al. (1992); Johann et al. (1992); Sommerfelt et al. (1990); Wilson et al. (1989); Miller et al. (1991); PCT International Publication No. WO/1994/026877A1).

[0124] At least six viral vector approaches are currently available for gene transfer in clinical trials, which utilize approaches that involve complementation of defective vectors by genes inserted into helper cell lines to generate the transducing agent.

[0125] pLASN and MFG-S are examples of retroviral vectors that have been used in clinical trials (See Dunbar et al., 1995; Kohn et al., 1995; Malech et al., 1997). PA317/pLASN was the first therapeutic vector used in a gene therapy trial (Blaese et al., 1995). Transduction efficiencies of 50% or greater have been observed for MFG-S packaged vectors. (Ellem et al., (1997); Dranoff et al., 1997).

[0126] Packaging cells are used to form virus particles that are capable of infecting a host cell. Such cells include 293 cells, which package adenovirus, AAV, and Psi-2 cells or PA317 cells, which package retrovirus. Viral vectors used in gene therapy are usually generated by a producer cell line that packages a nucleic acid vector into a viral particle. The vectors typically contain the minimal viral sequences required for packaging and subsequent integration into a host (if applicable), other viral sequences being replaced by an expression cassette encoding the protein to be expressed. The missing viral functions are supplied in trans by the packaging cell line. For example, AAV vectors used in gene therapy typically only possess inverted terminal repeat (ITR) sequences from the AAV genome which are required for packaging and integration into the host genome. Viral DNA is packaged in a cell line, which contains a helper plasmid encoding the other AAV genes, namely rep and cap, but lacking ITR sequences. The cell line is also infected with adenovirus as a helper. The helper virus promotes replication of the AAV vector and expression of AAV genes from the helper plasmid. The helper plasmid is not packaged in significant amounts due to a lack of ITR sequences. Contamination with adenovirus can be reduced by, e.g., heat treatment to which adenovirus is more sensitive than AAV. Additionally, AAV can be produced at clinical scale using baculovirus systems (see U.S. Pat. No. 7,479,554).

[0127] In many gene therapy applications, it is desirable that the gene therapy vector be delivered with a high degree of specificity to a particular tissue type. Accordingly, a viral vector can be modified to have specificity for a given cell type by expressing a ligand as a fusion protein with a viral coat protein on the outer surface of the virus. The ligand is chosen to have affinity for a receptor known to be present on the cell type of interest. For example, Han et al. (1995) reported that Moloney murine leukemia virus can be modified to express human heregulin fused to gp70, and the recombinant virus infects certain human breast cancer cells expressing human epidermal growth factor receptor. This principle can be extended to other virus-target cell pairs, in which the target cell expresses a receptor and the virus expresses a fusion protein comprising a ligand for the cell-surface receptor. For example, filamentous phage can be engineered to display antibody fragments (e.g., FAB or Fv) having specific binding affinity for virtually any chosen cellular receptor. Although the above description applies primarily to viral vectors, the same principles can be applied to nonviral vectors. Such vectors can be engineered to contain specific uptake sequences which favor uptake by specific target cells.

[0128] Gene therapy vectors can be delivered in vivo by administration to an individual patient, for example by systemic administration (e.g., intravitreal, intravenous, intraperitoneal, intramuscular, subdermal, or intracranial infusion) or topical application.

[0129] Vectors can be delivered to cells ex vivo, such as cells explanted from an individual patient (e.g., lymphocytes, bone marrow aspirates, tissue biopsy) or universal donor hematopoietic stem cells, followed by reimplantation of the cells into a patient, optionally after selection for cells which have incorporated the vector. A non-limiting exemplary ex vivo approach may involve removal of tissue (e.g., peripheral blood, bone marrow, and spleen) from a patient for culture, nucleic acid transfer to the cultured cells (e.g., hematopoietic stem cells), followed by grafting the cells to a target tissue (e.g., bone marrow; and spleen) of the patient. In some embodiments, the stem cell or hematopoietic stem cell may be further treated with a viability enhancer.

[0130] Ex vivo cell transfection for diagnostics, research, or for gene therapy (e.g., via re-infusion of the transfected cells into the host organism) is well known to those of skill in the art. In a preferred embodiment, cells are isolated from the subject organism, transfected with a nucleic acid composition, and re-infused back into the subject organism (e.g., patient). Various cell types suitable for ex vivo transfection are well known to those of skill in the art (See, e.g., Freshney, “Culture of Animal Cells, A Manual of Basic Technique and Specialized Applications (6th edition, 2010) and the references cited therein for a discussion of how to isolate and culture cells from patients).

[0131] Vectors (e.g., retroviruses, liposomes, etc.) containing therapeutic nucleic acid compositions can also be administered directly to an organism for transduction of cells in vivo. Administration is by any of the routes normally used for introducing a molecule into ultimate contact with blood or tissue cells including, but not limited to, injection, infusion, topical application (e.g., eye drops and cream) and electroporation. Suitable methods of administering such nucleic acids are available and well known to those of skill in the art, and, although more than one route can be used to administer a particular composition, a particular route can often provide a more immediate and more effective reaction than another route. According to some embodiments, the composition is delivered via IV injection.

[0132] Vectors suitable for introduction of transgenes into immune cells (e.g., T-cells) include non-integrating lentivirus vectors. See, e.g., U.S. Publication No. 2009/0117617.

[0133] Pharmaceutically acceptable carriers are determined in part by the particular composition being administered, as well as by the particular method used to administer the composition. Accordingly, there is a wide variety of suitable formulations of pharmaceutical compositions available, as described below (See, e.g., Remington's Pharmaceutical Sciences, 17th ed., 1989).

[0134] The disclosed compositions and methods may also be used in the manufacture of a medicament or immunotherapy for treating a cancer, disease, disorder, or infection in a patient.

### Examples of RNA Guide Sequence Portions which Specifically Target Alleles of SARM1 Gene

[0135] Although a large number of guide sequences can be designed to target the SARM1 gene, the nucleotide sequences described in Table 1 and are identified by SEQ ID NOs: 1-13457 were specifically selected to effectively implement the methods set forth herein. Examples of SARM1 biallelic knockout cells are provided in PCT International Application PCT/US2021/034583, the entire content of which is incorporated by reference. According to some aspects of the invention, the guide molecules disclosed herein may be utilized to generate SARM1 biallelic knockout cells exhibiting increased viability and/or increased functionality compared to counterpart cells that have wild-type or unmodified SARM1 expression. Non-limiting examples of cell types include liver cells (e.g., hepatocytes), lung cells, spleen cells, pancreas cells, colon cells, skin cells, bladder cells, eye cells, ocular cells, retinal cells, corneal cells, brain cells, esophagus cells, cells of the head, cells of the neck, cells of the ovary, cells of the testes, prostate cells, placenta cells, epithelial cells, endothelial cells, adipocyte cells, kidney/renal cells, heart cells, muscle cells, blood cells (e.g., white blood cells), immune cells, central nervous system (CNS) cells, ganglion cells, and the like, as well as combinations of the foregoing.

[0136] Table 1 shows guide sequences designed for use as described in the embodiments above to associate with SARM1 alleles. Each engineered guide molecule is further designed such as to associate with a target genomic DNA sequence of interest that lies next to a protospacer adjacent motif (PAM), e.g., a PAM matching the sequence NGG or NAG, where “N” is any nucleobase. The guide sequences were designed to work in conjunction with one or more different CRISPR nucleases, including, but not limited to, e.g. SpCas9WT (PAM SEQ: NGG), SpCas9.VQR.1 (PAM SEQ: NGAN), SpCas9.VQR.2 (PAM SEQ: NGNG), SpCas9.EQR (PAM SEQ: NGAG), SpCas9.VRER (PAM SEQ: NGCG), SaCas9WT (PAM SEQ: NNGRRT), SPRY (PAM SEQ: NRN or NYN), NmCas9WT (PAM SEQ: NNNNGATT), Cpf1 (PAM SEQ: TTTV), or JeCas9WT (PAM SEQ: NNNVRYM). RNA molecules of the present invention are each designed to form complexes in conjunction with one or more different CRISPR nucleases and designed to target polynucleotide sequences of interest utilizing one or more different PAM sequences respective to the CRISPR nuclease utilized.

TABLE 1
Guide sequence portions designed to associate with specific SARM1 gene targets

| | SEQ ID NOs: of | SEQ ID NOs: of | SEQ ID NOs: of |
|---|---|---|---|
| | 20-nucleotide | 21-nucleotide | 22-nucleotide |
| | guide sequence | guide sequence | guide sequence |
| Target | portions | portions | portions |
| 17:28372165_G_C | 1-56 | 57-114 | 115-174 |
| rs782593684_REF | | | |
| 17:28372165_G_C | 1, 4, 8, 20, 24, | 57, 60, 64, 76, | 115, 118, 122, |
| rs782593684_SNP | 26-27, 33, 35, | 80, 82-83, 92, | 132, 139, 141- |
| | 37, 41, 47, 49, | 94, 98, 102, 105, | 142, 151, 157, |
| | 51, 53, 56, | 107, 109, 111, | 161, 164-165, |
| | 175-214 | 114, 215-256 | 167, 169, 171, |
| | | | 174, 257-300 |
| 17:28372349_C_CT | 301-356 | 357-414 | 415-474 |
| REF | | | |
| 17:28372349_C_CT | 301, 304, 315, | 357, 361, 364, | 415-416, 419, |
| SNP | 321, 326-328, | 368, 373, 384- | 422, 424, 427, |
| | 335, 338, 340, | 385, 393, 396, | 432, 443-444, |
| | 344, 346-348, | 398, 402, 404- | 458, 462, 464- |
| | 353, 355-356, | 406, 411, 413- | 466, 471, 473- |
| | 475-513 | 414, 514-554 | 474, 555-597 |
| 17:28372010-28372532 | 1-56, 301-356, | 57-114, 357-414, | 115-174, 415- |
| Exon 1, including the ATG start | 1348-2223 | 2224-3095 | 474, 3096-3963 |
| codon to 30 nt downstream of | | | |
| Exon 1 | | | |
| 17:28381173-28381851 | 3964-5203 | 5204-6443 | 6444-7683 |
| Exon 2, including 30 nt | | | |
| upstream and 30 nt downstream | | | |
| to Exon 2 | | | |
| 17:28384327-28384599 | 7684-8111 | 8112-8539 | 8540-8967 |
| Exon 3, including 30 nt | | | |
| upstream and 30 nt downstream | | | |
| to Exon 3 | | | |
| 17:28384809-28384960 | 8968-9153 | 9154-9339 | 9340-9525 |
| Exon 4, including 30 nt | | | |
| upstream and 30 nt downstream | | | |
| to Exon 4 | | | |
| 17:28385010-28385305 | 9526-9999 | 10000-10473 | 10474-10947 |
| Exon 5, including 30 nt | | | |
| upstream and 30 nt downstream | | | |
| to Exon 5 | | | |
| 17:28388144-28388306 | 10948-11155 | 11156-11363 | 11364-11571 |
| Exon 6, including 30 nt | | | |
| upstream and 30 nt downstream | | | |
| to Exon 6 | | | |
| 17:28388320-28388569 | 11572-11953 | 11954-12335 | 12336-12717 |
| Exon 7, including 30 nt | | | |
| upstream and 30 nt downstream | | | |
| to Exon 7 | | | |
| 17:28395875-28396056 | 12718-12963 | 12964-13209 | 13210-13455 |
| Exon 8, including 30 nt | | | |
| upstream and 30 nt downstream | | | |
| to Exon 8 | | | |
| 17:28396127-28396309 | 598-849 | 850-1099 | 1100-1347 |
| Exon 9, including 30 nt | | | |
| upstream of Exon 9 to the stop | | | |
| codon | | | |

The indicated locations listed in column 1 of the Table 1 are based on gnomAD v3 database and UCSC Genome Browser assembly ID: hg38, Sequencing/Assembly provider ID: Genome Reference Consortium Human GRCh38.p12 (GCA_000001405.27). Assembly date: December 2013 initial release; December 2017 patch release 12.

[0137] Examples are provided below to facilitate a more complete understanding of the invention. The following examples illustrate the exemplary modes of making and practicing the invention. However, the scope of the invention is not limited to specific embodiments disclosed in these Examples, which are for purposes of illustration only.

### EXPERIMENTAL DETAILS

### Example 1: SARM1 Knockout Anaylsis

[0138] Guide sequence portions comprising 17-50 contiguous nucleotides containing nucleotides in the sequence set forth in any one of SEQ ID NOs: 1-13457 are screened for high on target activity using SpCas9 in Hela cells. On target activity is determined by DNA capillary electrophoresis analysis.

### Example 2: Additional SARM1 Editing Anaylsis

[0139] Sterile alpha and Toll/interleukin-1 receptor motif-containing 1 (SARM1) is NAD+ hydrolase whose activity is associated with axonal degeneration. To select optimal RNA guide molecules for biallelic knockout of SARM1, 23 RNA guide molecules targeting SARM1 exons were screened in Hela cells (Table 2). Briefly, an SpCas9 coding plasmid (64 ng) was co-transfected with a DNA plasmid that expresses a RNA guide molecule (20 ng) in a 96 well plate format using jetOPTIMUS® reagent (Polyplus). Cells were harvested 72 h post DNA transfection, genomic DNA was extracted and used for capillary electrophoresis using primers which amplify the endogenous genomic regions. The graphs in FIG. 1A represent the average of % editing±standard deviation (STDV) of three (3) independent experiments. Analysis of capillary electrophoresis data for all RNA guide molecules shows the activity ranges from 10% to 90%.

[0140] In addition, screens were performed with OMNI-50 (SEQ ID NO: 13471) and OMNI-79 (SEQ ID NO: 13472) CRISPR nucleases in Hela cells. Transfection conditions were identical to the conditions described for SpCas9 transfections. Editing efficiency was measured by next-generation sequencing (NGS) analysis. For OMNI-50, g13 editing efficiency was 43% (STDV=3.94). For OMNI-79, g33 editing efficiency was 35% (STDV=4.2). See FIG. 1B. Guide sequence portions of the RNA guide molecules are listed in Table 4.

[0141] To validate RNA guide molecules conferring a Sarm1 knockout by non-sense mediated decay (NMD), mouse Neuro-2a cells which express SARM1 were used. To test the effect of the ten (10) most active guide RNA molecules that target human SARM1 from the HeLa screen, we identified ten (10) mouse specific guide RNA molecules that target mouse SARM1 DNA which correspond to the human guides RNA molecules. The activity of the mouse RNA guide molecules was tested in mouse cells. Briefly, 150×10³ Neuro-2a cells were mixed with pre-assembled RNPs composed of 105 pmole SpCas9 protein and 120 pmole sgRNAs (see Table 3), mixed with 100 pmole of electroporation enhancer (IDT-1075916), and electroporated using SF cell 4D-nucleofector X Kit S (PBC2-00675, Lonza) by applying the DS-134 program. A fraction of cells was harvested 72 hours post electroporation and genomic DNA was extracted to measure on-target activity by NGS. According to NGS analysis, all guide RNA molecules depicted high insertion or deletion (indel) activity (FIG. 2).

[0142] To assess the effect of the editing on the level of SARM1 transcripts, total RNA was extracted from Neuro-2a cells seven (7) days post electroporation and the mRNA level of Sarm1 was measured by qRT-PCR. The results demonstrate a more than an 80% reduction in the level of Sarm1 mRNA due to nonsense-mediated decay (NMD) (FIG. 3).

[0143] Next, a novel CRISPR nuclease, OMNI-103 (SEQ ID NO: 13473), which displays unique PAM requirements, was tested for editing of SARM1. This nuclease was tested in HeLa cells as described above. To this end, OMNI-103 was transfected into HeLa cells using a corresponding OMNI-P2A-mCherry expression vector (pmOMNI, Table 7) together with an sgRNA molecule designed to target a specific location in the human genome (guide sequence portion (gRNA) sequence listed in Table 5A). At 72 hours, cells were harvested, and half of the cells were used for quantification of transfection efficiency by FACS using mCherry fluorescence as a marker. The rest of the cells were lysed, and their genomic DNA content was used in a PCR reaction which amplified the corresponding putative genomic targets. Amplicons were subjected to NGS and the resulting sequences were then used calculate the percentage of editing events in each target site. Short Insertions or deletions (indels) around the cut site are the typical outcome of repair of DNA ends following nuclease induced DNA cleavage. The calculation of % editing was therefore deduced from the fraction of indels containing sequences within each amplicon. See Table 5B and FIG. 4.

### Example 3: SARM1-Edited NK Cell Assays

### Metabolic Assays

[0144] Glycolysis and oxidative mitochondrial metabolism: Seahorse assays will be performed according to the manufacturer's instructions with modifications to simultaneously analyze glycolysis and oxidative mitochondrial metabolism using the Seahorse XF Glycolysis Stress Test Kit and the Seahorse XF Cell Mito Stress Kit (Agilent Technologies). Briefly, NK and iNK cells are washed and resuspended in glucose-free media (GIBCO). 1.5×10⁵ cells are plated per well in triplicate and analyzed with a Seahorse Xfe96 Analyzer (Agilent Technologies). Glucose, oligomycin, FCCP, sodium pyruvate, rotenone, and antimycin A are serially injected to measure metabolic function. SRC measurements are calculated as average maximal OCR values minus average basal OCR values. ATP-linked respiration is calculated as average basal OCR values minus average post-oligomycin values. Glycolysis is calculated as average post-glucose ECAR values minus average basal ECAR values. Glycolytic reserve is calculated as average maximal ECAR values minus post-glucose ECAR values.

[0145] ATP quantification assays: 1×10⁵ NK and iNK cells per well are analyzed using the ATP Bioluminescence Assay Kit HS II (Sigma Aldrich) and analyzed with an Infinite M200 PRO Luminometer (Tecan).

[0146] NAD+ and NADH quantification assays: NAD+ and NADH concentrations are quantified using the NAD/NADH Cell-Based Assay Kit (Cayman Chemical) as per the manufacturer's instructions and analyzed with an Infinite M200 PRO Luminometer. For analyses of oxidative stress, NK and iNK cells are cultured with hydrogen peroxide (Sigma Aldrich) for 1 hour. Following treatment, cells are cultured in serum-free media containing 5 mM MitoSox Indicator Dye (Thermo Fisher). Cells are then washed and counter stained with anti-CD56 antibody and fixable viability dye for flow cytometry analysis. For mass spectrometry analysis of metabolites, iNK cells and expanded peripheral blood NK cells are snap frozen in liquid nitrogen and metabolomics is performed.

### Killing Assays

[0147] In vitro assays to assess cytotoxicity: Tumor target cells are CFSE-stained and resuspended in media containing 5% FBS. NK effector cells are co-cultured with the target cells in 96-well plate at 5:1 E:T ratio and in the presence of Propidium Iodide. The cocultured cells are placed in the IncuCyte (Sartorius), live cell analysis system, for up to 24 hours and the killing ability of the NK cells are quantified by of the double-stained cells, which indicates dead target cells.

[0148] 3-dimensional tumor spheroid cytotoxicity assays: Tumor cells are cultured for a few day's to allow for spheroid formation. Next, 4×10⁴ NK or iNK cells were gently added to each well and cells were co-cultured for few days. At the end of the culture, cells in each well are disrupted into a single cell suspension and stained with a fluorescently conjugated CD56 antibody and fixable viability dye for flow cytometry analysis. Tumor cells are quantified based on NucLight Red, and NK or iNK cells are quantified based on CD56 expression.

### In Vivo Retention Model of SARM1-Edited NK Cells:

[0149] In vivo functionality of the edited NK cells will be tested using retention model in NSG mice. Three experimental groups (control, edited cells and unedited cells) are used. The mice will be irradiated with 300 rad a day before the injection with the cells. The cells will be resuspended in 200 μl buffer and injected to the mice intravenously. IL2 and IL15 will be administrated via intraperitoneal injection. The mice will be sacrificed 3 to 4 days post-injection, and bone-marrow and spleen will be analyzed to measure the NK retention ability. A table summarizing the assay is shown below:

| | | | | Cytokines dose | | |
|---|---|---|---|---|---|---|
| | | NK cells | | (μg/200 μl/mouse) | | No. of |
| Grp | Description | Cell dose | Inj. Vol (μl) | IL2 | IL15 | mice |
| A | HSA buffer (control) | — | 200 μl | 5 | 0.5 | 4 |
| B | Unedited cells | 10 × 10⁶ | | | | 10 |
| C | Edited cells | 10 × 10⁶ | | | | 10 |

TABLE 2
20-nucleotide guide sequence portion sequences targeting human
SARM1 coding sequence

| Guide | | |
|---|---|---|
| sequence | | |
| portion | | |
| (gRNA) | Sequence of gRNA | PAM |
| g1 | GGCCCAUGGUGGGCUGCGGG (SEQ ID NO: 39) | UGG |
| g2 | GCGCCUGCUGGAGCAGAUCC (SEQ ID NO: 1927) | UGG |
| g3 | CUCCACCAGUUGGAAGACCU (SEQ ID NO: 1745) | CGG |
| g4 | AGAGACCGCGUGGCGCGCAU (SEQ ID NO: 13456) | UGG |
| g5 | CGUGAUCCUGAACCUGGCGA (SEQ ID NO: 4489) | AGG |
| g6 | GGCAACUGCGCGCUGCACGG (SEQ ID NO: 4870) | GGG |
| g7 | GGCGAGCGGGAAGAGCCACU (SEQ ID NO: 4897) | CGG |
| g8 | CAUCCAGAGCCUGAAACGCC (SEQ ID NO: 7785) | UGG |
| g9 | UGCUGGGCGAGGAGGUGCCA (SEQ ID NO: 8084) | CGG |
| g10 | AGCAACCUGGCGGACUGGCU (SEQ ID NO: 9562) | GGG |
| g11 | GGCGGACUGGCUGGGCAGCC (SEQ ID NO: 9868) | UGG |
| g12 | ACACGCGGUGCAGCAGGGAG (SEQ ID NO: 9534) | CGG |
| g13 | CUCAGACACGCGGUGCAGCA (SEQ ID NO: 9726) | GGG |
| g14 | CACUCCCCGCUGCCCUGUAC (SEQ ID NO: 10989) | UGG |
| g15 | UCCCCGCUGCCCUGUACUGG (SEQ ID NO: 11127) | UGG |
| g16 | UGCCACCAGUACAGGGCAGC (SEQ ID NO: 11136) | GGG |
| g17 | AAGGUGCACCUGCAGCUGCA (SEQ ID NO: 11586) | UGG |
| g18 | CAUGCAAGACCAUGACUGCA (SEQ ID NO: 11704) | AGG |
| g19 | GCAGCUGCAGGUGCACCUUC (SEQ ID NO: 13457) | AGG |
| g20 | GCACCCAAUCCUUGCAGUCA (SEQ ID NO: 11795) | UGG |
| g21 | AUUGUGACUGCUUUAAGCUG (SEQ ID NO: 12768) | CGG |
| g22 | AACAUUGUGCCCAUCAUUGA (SEQ ID NO: 12719) | UGG |
| g23 | CACUCGAAGCCAUCAAUGAU (SEQ ID NO: 12777) | GGG |

TABLE 3
20-nucleotide guide sequence portion sequences targeting mouse
Sarm1 coding sequence

| Guide | | |
|---|---|---|
| sequence | | |
| portion | | |
| (gRNA) | Sequence of gRNA | PAM |
| g2 mouse | GCGCUUGCUGGAGCAGAUCC (SEQ ID NO: 13463) | UGG |
| g6 mouse | GCGAACUGCGCGCUGCACGG (SEQ ID NO: 13464) | GGG |
| g7 mouse | AGCGAGCGGGAAGAGCCACU (SEQ ID NO: 13465) | CGG |
| g8 mouse | UAUCCAGAGCCUGAAACGCC (SEQ ID NO: 13466) | UGG |
| g12 mouse | ACACGCGGUGCAGCAGGGAG (SEQ ID NO: 9534) | CGG |
| g13 mouse | CUCUGACACGCGGUGCAGCA (SEQ ID NO: 13467) | GGG |
| g14 mouse | CAUUCCCCGCUGCCCUGUAC (SEQ ID NO: 13468) | UGG |
| g15 mouse | UCCCCGCUGCCCUGUACUGG (SEQ ID NO: 11127) | AGG |
| g17 mouse | AAGGUGCACCUGCAGCUUCA (SEQ ID NO: 13469) | CGG |
| g18 mouse | CAUGCAGGACCAUGACUGCA (SEQ ID NO: 13470) | AGG |

TABLE 4
22-nucleotide guide sequence portion sequences targeting human
SARM1 coding sequence

| Guide | | | |
|---|---|---|---|
| sequence | | | |
| portion | | | |
| (gRNA) | Sequence of gRNA | PAM | CRISPR nuclease |
| g13 | UGCUCAGACACGCGGUGCAGCA | GGG | OMNI-50 |
| | (SEQ ID NO: 9803) | | |
| g33 | GUAGCGGUGUUGGCGACUAACA | AGG | OMNI-79 |
| | (SEQ ID NO: 6567) | | |

TABLE 5A
22-nucletoide guide sequence portion sequences targeting sequences
located in SARM1 region

| Guide sequence | |
|---|---|
| portion (gRNA) | Sequence of guide sequence portion |
| g42 | CGCGCGGCCUGCACACGCGUCU (SEQ ID NO: 3422) |
| g43 | CGCCACUGCGCGCUGGCGCUGG (SEQ ID NO: 6877) |
| g44 | GUGUCUGAGCAGCAGCUGCUGG (SEQ ID NO: 10869) |
| g45 | GAUGUCUUCAUCAGCUACCGCC (SEQ ID NO: 11485) |

TABLE 5B
Quantitative results depicted in FIG. 4

| | % Editing | % mCherry | STDV ″% Editing″ | STDV ″% mCherry″ |
|---|---|---|---|---|
| g42 | 24.1566667 | 93.8333333 | 0.215019379 | 0.450924975 |
| g43 | 13.3566667 | 79.2333333 | 3.303957223 | 0.550757055 |
| g44 | 26.6933333 | 94 | 4.196431023 | 1.322875656 |
| g45 | 43.415 | 90.2 | 8.548920985 | 2.4 |

TABLE 6
Novel OMNI CRISPR nucleases, PAM requirements, and sgRNA
scaffold sequences

| OMNI CRISPR | PAM | |
|---|---|---|
| Nuclease and gRNA | Sequence | sgRNA Scaffold Sequence |
| OMNI-50 | NGG | UGCUCUGACACGCGGUGCAGCAGUUUGAGAGUU |
| (SEQ ID NO: 13471) | | AUGUAAGAAAUUACAUGACGAGUUCAAAUAAAA |
| with g13 | | AUUUAUUCAAACCGCCUAUUUAUAGGCCGCAGA |
| | | UGUUCUGCAUUAUGCUUGCUAUUGCAAGCUUUU |
| | | UU (SEQ ID NO: 13474) |
| OMNI-79 | NGR | GUAGCGGUGUUGGCGACUAACAGUUGCCGCUGG |
| (SEQ ID NO: 13472) | | AGAAAUCCAGUUGUUAACAAGCAGCUUGACUGC |
| with g33 | | ACCAAAUAAGGCGGGGGCUGCGGCCCUCGCUUU |
| | | UUU (SEQ ID NO: 13475) |
| OMNI-103 | NNRACT | CGCCACUGCGCGCUGGCGCUGGGUUUGAGAGUA |
| (SEQ ID NO: 13473) | | GUGUAAGAAAUUACACUACAAGUUCAAAUAAAA |
| with g42 | | AUUUAUUCAAAUCCAUUUGCUACAUUGUGUAGA |
| | | AUUUAAAGAUCUGGCAACAGAUCUUUUUUU (SEQ |
| | | ID NO: 13476) |
| OMNI-103 | NNRACT | GUGUCUGAGCAGCAGCUGCUGGGUUUGAGAGUA |
| (SEQ ID NO: 13473) | | GUGUAAGAAAUUACACUACAAGUUCAAAUAAAA |
| with g43 | | AUUUAUUCAAAUCCAUUUGCUACAUUGUGUAGA |
| | | AUUUAAAGAUCUGGCAACAGAUCUUUUUUU (SEQ |
| | | ID NO: 13477) |
| OMNI-103 | NNRACT | GAUGUCUUCAUCAGCUACCGCCGUUUGAGAGUA |
| (SEQ ID NO: 13473) | | GUGUAAGAAAUUACACUACAAGUUCAAAUAAAA |
| with g44 | | AUUUAUUCAAAUCCAUUUGCUACAUUGUGUAGA |
| | | AUUUAAAGAUCUGGCAACAGAUCUUUUUUU (SEQ |
| | | ID NO: 13478) |
| OMNI-103 | NNRACT | UGCUCUGACACGCGGUGCAGCAGUUUGAGAGUU |
| (SEQ ID NO: 13473) | | AUGUAAGAAAUUACAUGACGAGUUCAAAUAAAA |
| with g45 | | AUUUAUUCAAACCGCCUAUUUAUAGGCCGCAGA |
| | | UGUUCUGCAUUAUGCUUGCUAUUGCAAGCUUUU |
| | | UU (SEQ ID NO: 13479) |

TABLE 7
OMNI CRISPR nuclease mammalian expression plasmid and elements

| Plasmid | | |
|---|---|---|
| Name | Purpose | Elements |
| pmOMNI | Expressing OMNI polypeptide | CMV promoter-Kozak-SV40 NLS- |
| | in the mammalian system | OMNI ORF (human optimized)-HA-SV40 |
| | | NLS-P2A-mCherry-bGH poly(A) signal |

TABLE 7
Annex

| | SEQ ID NO of Amino | SEQ ID NO of DNA |
|---|---|---|
| Element | Acid Sequence | sequence |
| HA Tag | SEQ ID NO: 13480 | SEQ ID NO: 13484 |
| NLS | SEQ ID NO: 13481 | SEQ ID NO: 13485 |
| P2A | SEQ ID NO: 13482 | SEQ ID NO: 13486 |
| mCherry | SEQ ID NO: 13483 | SEQ ID NO: 13487 |

### Example 4: Knockout of SARM1 in NK Cells Improves Killing Activity of the NK Cells

### Introduction

[0150] SARM1, Sterile alpha and Toll/interleukin-1 receptor motif-containing 1, is NAD+ hydrolase whose activity is associated with axonal degeneration. GMX1778 is a potent and specific inhibitor of the NAD+ biosynthesis enzyme nicotinamide phosphoribosyltransferase (NAMPT). Selective inhibition of NAMPT by GMX1778 blocks the production of NAD+ and results in cell death. Thus, NAMPT represents an important controller of intracellular NAD concentrations, and consequently, also of energy metabolism. See FIG. 5.

### Results

[0151] Editing and NGS: 2×10⁶ thawed primary NK cells were grown for five (5) days and were then electroporated with 113 pmol SpCas9 and 226 pmol SARM1 g91 gRNA (GUACUGGUGGCAAACCCAGU (SEQ ID NO: 11104)). After seven (7) days, cells were sent for NGS analysis, which showed 90% editing of SARM1. See FIG. 6A.

[0152] Killing assay: Ten (10) days after electroporation, 6250 NK cells were plated with 2,500 MCF7 target cells labeled with GFP, in triplicate. Co-cultures were incubated for 24 hours in 2.5:1 E:T ratio. Images were taken every hour by Incucyte®. Killing assay medium was MEM-alpha supplemented with 10% FBS and 20 ng/ml IL-15. See FIG. 6B.

[0153] Viability (ATPlite) assay: Fifteen (15) days after electroporation, 50,000 SARM1_g91_KO and non-treated (NT) cells were plated in triplicate with increasing concentrations of GMX1778 and were incubated for 48 hours. Cell viability was quantified by the ATPlite kit. See FIG. 6C.

### Conclusions

[0154] These results indicate that SARM1-knockout NK cells show improvement in cell viability upon GMX1778 treatment (SARM1 inducer). The results further demonstrate that SARM1-knockout NK cells show improvement in killing ability.

[0155] Thus, the results of this Examples represent a proof-of-concept that knockout of SARM1 in NK cells improves killing activity of the NK cells. Other nucleases and guide molecule combinations may be used to knockout SARM1 and achieve the same effect. These unexpected results are the first showing that knocking out SARM1 in NK cells improves the NK cells' killing activity. Thus, SARM1-KO NK cells may be used in immunotherapies, for example, cancer treatments.

### REFERENCES

[0156] 1. Ahmad and Allen (1992) “Antibody-mediated Specific Binging and Cytotoxicity of Lipsome-entrapped Doxorubicin to Lung Cancer Cells in Vitro”, Cancer Research 52:4817-20.
[0157] 2. Anderson (1992) “Human gene therapy”, Science 256:808-13.
[0158] 3. Basha et al. (2011) “Influence of Cationic Lipid Composition on Gene Silencing Properties of Lipid Nanoparticle Formulations of siRNA in Antigen-Presenting Cells”, Mol. Ther. 19(12):2186-200.
[0159] 4. Behr (1994) Gene transfer with synthetic cationic amphiphiles: Prospects for gene therapy”, Bioconjuage Chem 5:382-89.
[0160] 5. Blaese (1995) “Vectors in cancer therapy: how will they deliver”, Cancer Gene Ther. 2:291-97.
[0161] 6. Blaese et al. (1995) “T lympocyte-directed gene therapy for ADA-SCID: initial trial results after 4 years”, Science 270(5235):475-80.
[0162] 7. Buchschacher and Panganiban (1992) “Human immunodeficiency virus vectors for inducible expression of foreign genes”, J. Virol. 66:2731-39.
[0163] 8. Burstein et al. (2017) “New CRISPR-Cas systems from uncultivated microbes”, Nature 542:237-41.
[0164] 9. Chang and Wilson (1987) “Modification of DNA ends can decrease end-joining relative to homologous recombination in mammalian cells”, Proc. Natl. Acad. Sci. USA 84:4959-4963.
[0165] 10. Chung et al. (2006) “Agrobacterium is not alone: gene transfer to plants by viruses and other bacteria”, Trends Plant Sci. 11(1):1-4.
[0166] 11. Coelho et al. (2013) “Safety and efficacy of RNAi therapy for transthyretin amyloidosis” N. Engl. J. Med. 369, 819-829.
[0167] 12. Collias and Beisel (2021) “CRISPR technologies and the search for the PAM-free nuclease”, Nature Communications 12, 555.
[0168] 13. Crystal (1995) “Transfer of genes to humans: early lessons and obstacles to success”, Science 270(5235):404-10.
[0169] 14. Dillon (1993) “Regulation gene expression in gene therapy” Trends in Biotechnology 11(5):167-173.
[0170] 15. Dranoff et al. (1997) “A phase I study of vaccination with autologous, irradiated melanoma cells engineered to secrete human granulocyte macrophage colony stimulating factor”, Hum. Gene Ther. 8(1):111-23.
[0171] 16. Dunbar et al. (1995) “Retrovirally marked CD34-enriched peripheral blood and bone marrow cells contribute to long-term engraftment after autologous transplantation”, Blood 85:3048-57.
[0172] 17. Ellem et al. (1997) “A case report: immune responses and clinical course of the first human use of ganulocyte/macrophage-colony-stimulating-factor-tranduced autologous melanoma cells for immunotherapy”, Cancer Immunol Immunother 44:10-20.
[0173] 18. Gao and Huang (1995) “Cationic liposome-mediated gene transfer” Gene Ther. 2(10):710-22.
[0174] 19. Haddada et al. (1995) “Gene Therapy Using Adenovirus Vectors”, in: The Molecular Repertoire of Adenoviruses III: Biology and Pathogenesis, ed. Doerfler and Böhm, pp. 297-306.
[0175] 20. Han et al. (1995) “Ligand-directed retro-viral targeting of human breast cancer cells”, Proc Natl Acad Sci U.S.A. 92(21):9747-51.
[0176] 21. Hu et al. (2018) “Evolved Cas9 variants with broad PAM compatibility and high DNA specificity”, Nature 556(7699):57-63.
[0177] 22. Jinek et al. (2012) “A programmable dual-RNA-guided DNA endonuclease in adaptive bacterial immunity,” Science 337(6096):816-21.
[0178] 23. Johan et al. (1992) “GLVR1, a receptor for gibbon ape leukemia virus, is homologous to a phosphate permease of Neurospora crassa and is expressed at high levels in the brain and thymus”, J Virol 66(3):1635-40.
[0179] 24. Judge et al. (2006) “Design of noninflammatory synthetic siRNA mediating potent gene silencing in vivo”, Mol Ther. 13(3):494-505.
[0180] 25. Kohn et al. (1995) “Engraftment of gene-modified umbilical cord blood cells in neonates with adnosine deaminase deficiency”, Nature Medicine 1:1017-23.
[0181] 26. Kremer and Perricaudet (1995) “Adenovirus and adeno-associated virus mediated gene transfer”, Br. Med. Bull. 51(1):31-44.
[0182] 27. Macdiarmid et al. (2009) “Sequential treatment of drug-resistant tumors with targeted minicells containing siRNA or a cytotoxic drug”, Nat Biotehcnol. 27(7):643-51.
[0183] 28. Malech et al. (1997) “Prolonged production of NADPH oxidase-corrected granulocyes after gene therapy of chronic granulomatous disease”, PNAS 94(22):12133-38.
[0184] 29. Miller et al. (1991) “Construction and properties of retrovirus packaging cells based on gibbon ape leukemia virus”, J Virol. 65(5):2220-24.
[0185] 30. Miller (1992) “Human gene therapy comes of age”, Nature 357:455-60.
[0186] 31. Mitani and Caskey (1993) “Delivering therapeutic genes—matching approach and application”, Trends in Biotechnology 11(5):162-66.
[0187] 32. Molday et al. (2013) “X-linked juvenile retinoschisis: Clinical diagnosis, genetic analysis, and molecular mechansims”, Prog Retin Eye Res. 31(3):195-212.
[0188] 33. Nabel and Felgner (1993) “Direct gene transfer for immunotherapy and immunization”, Trends in Biotechnology 11(5):211-15.
[0189] 34. Nishimasu et al. (2018) “Engineered CRISPR-Cas9 nuclease with expanded targeting space”, Science 361(6408):1259-1262.
[0190] 35. Remy et al. (1994) “Gene Transfer with a Series of Lipphilic DNA-Binding Molecules”, Bioconjugate Chem. 5(6):647-54.
[0191] 36. Sentmanat et al. (2018) “A Survey of Validation Strategies for CRISPR-Cas9 Editing”, Scientific Reports 8:888, doi:10.1038/s41598-018-19441-8.
[0192] 37. Sommerfelt et al. (1990) “Localization of the receptor gene for type D simian retroviruses on human chromosome 19”, J. Virol. 64(12):6214-20.
[0193] 38. Van Brunt (1988) “Molecular framing: transgenic animals as bioactors” Biotechnology 6:1149-54.
[0194] 39. Vigne et al. (1995) “Third-generation adenovectors for gene therapy”, Restorative Neurology and Neuroscience 8(1,2):35-36.
[0195] 40. Walton et al. (2020) “Unconstrained genome targeting with near-PAMless engineered CRISPR-Cas9 variants”, Science 368(6488):290-296.
[0196] 41. Weissman and Kariko (2015) “mRNA: Fulfilling the promise of gene therapy”, Molecular Therapy (9):1416-7.
[0197] 42. Wilson et al. (1989) “Formation of infectious hybrid virion with gibbon ape leukemia virus and human T-cell leukemia virus retroviral envelope glycoproteins and the gag and pol proteins of Moloney murine leukemia virus”, J. Virol. 63:2374-78.
[0198] 43. Yu et al. (1994) “Progress towards gene therapy for HIV infection”, Gene Ther. 1(1):13-26.
[0199] 44. Zetsche et al. (2015) “Cpf1 is a single RNA-guided endonuclease of a class 2 CRIPSR-Cas system” Cell 163(3):759-71.
[0200] 45. Zuris et al. (2015) “Cationic lipid-mediated delivery of proteins enables efficient protein based genome editing in vitro and in vivo” Nat Biotechnol. 33(1):73-80.

1. A method for adoptive cell therapy or prophylaxis comprising administering SARM1-inhibited or SARM1-inactivated cells to a subject suffering from or determined to be at risk of suffering from a cancer, infection, disease, or disorder.

2. The method of claim 1, wherein the SARM1-inhibited or SARM1-inactivated cells are modified to have reduced or inactivated expression of SARM1, or the cells are modified to express a dominant negative SARM1 sequence variant or dominant negative fragment thereof.

3. The method of claim 1 or 2, wherein the cells are selected from the group consisting of hematopoietic stem cells (HSCs), induced pluripotent stem cells (iPS cells), iPSc-derived cells, natural killer cells (NKs), iPS-derived NK cells (iNKs), T cells, innate-like T cells (iTs), natural killer T cells (NKTs), γδ T cells, iPSc-derived T cells, invariant NKT cells (iNKTs), iPSc-derived NKTs, monocytes, or macrophages.

4. The method of any one of claims 1-3, wherein the SARM1-inhibited or SARM1-inactivated cells display increased functionality, increased viability, increased persistence, increased proliferation, and/or increased tumor retention in the subject relative to counterpart cells that have wild-type or unmodified SARM1 expression.

5. The method of any one of claims 1-4, wherein the SARM1-inhibited or SARM1-inactivated cells display increased cytotoxic activity and/or increased killing activity in the subject relative to counterpart cells that have wild-type or unmodified SARM1 expression.

6. The method of any one of claims 1-5, wherein the subject is suffering from or determined to be at risk of suffering from a cancer.

7. The method of claim 6, wherein the cancer comprises a tumor and/or the cancer is a hematological malignancy.

8. The method of claim 7, wherein the cancer is selected from the group consisting of static melanoma, metastatic prostate cancer, metastatic breast cancer, triple negative breast cancer, bladder cancer, brain cancer, esophageal cancer, liver cancer, head and neck cancer, squamous cell lung cancer, non-small lung cell cancer, Merkel cell carcinoma, sarcoma, hepatocellular cancer, multiple myeloma, leukemia, non-Hodgkin's lymphoma, lymphoma, B cell lymphoma, acute myeloid leukemia, pancreatic cancer, colorectal carcinoma, cervical cancer, gastric carcinoma, kidney cancer, metastatic renal cell carcinoma, leukemia, ovarian cancer, and malignant glioma.

9. The method of any one of claims 1-8, wherein the SARM1-inhibited or SARM1-inactivated cells are created ex vivo or in vitro.

10. The method of any one of claims 1-8, wherein the SARM1-inhibited or SARM1-inactivated cells are created in vivo.

11. The method of any one of claims 1-10, wherein the SARM1-inhibited or SARM1-inactivated cells are created from cells obtained from the subject by mobilization and/or by apheresis.

12. The method of claim 11, wherein the cells are obtained the cells from the subject by bone marrow aspiration.

13. The method of any one of claims 1-12, wherein the cells are prestimulated prior to the SARM1 inhibition or SARM1 inactivation of the cells.

14. The method of any one of claims 1-13, wherein the SARM1-inhibited or SARM1-inactivated cells are culture expanded prior to administration to the subject.

15. The method of any one of claims 1-14, wherein the SARM1-inhibited or SARM1-inactivated cells are capable of engraftment.

16. The method of any one of claims 1-15, wherein the SARM1-inhibited or SARM1-inactivated cells are capable of giving rise to progeny cells.

17. The method of claim 16, wherein the SARM1-inhibited or SARM1-inactivated cells are capable of giving rise to progeny cells after an engraftment.

18. The method of claim 17, wherein the SARM1-inhibited or SARM1-inactivated cells are capable of giving rise to progeny cells after an autologous engraftment.

19. The method of claim 17 or 18, wherein the SARM1-inhibited or SARM1-inactivated cells are capable of giving rise to progeny cells for at least 12 months or at least 24 months after engraftment.

20. The method of any one of claims 1-19, wherein the SARM1-inhibited or SARM1-inactivated cells are created by delivering a gapmer, shRNA, siRNA, a customized TALEN, meganuclease, zinc finger nuclease, CRISPR nuclease, or a small molecule inhibitor to cells.

21. The method of any one of claims 1-19, wherein alleles of the SARM1 gene in the SARM1-inhibited or SARM1-inactivated cells are subjected to an insertion or deletion mutation.

22. The method of claim 21, wherein the insertion or deletion mutation creates an early stop codon.

23. The method of any one of claims 1-22, wherein SARM1-inhibited or SARM1-inactivated cells are created by a method comprising
introducing to the cells a composition comprising:
at least one CRISPR nuclease, or a nucleotide molecule encoding a CRISPR nuclease; and
an RNA molecule comprising a guide sequence portion, or a nucleotide molecule encoding the RNA molecule,
wherein a complex of the CRISPR nuclease and the RNA molecule affects a double strand break in alleles of the SARM1 gene,
wherein the guide sequence portion of the RNA molecule comprises 17-50 contiguous nucleotides.

24. The method of claim 23, wherein guide sequence portion is complementary to a target sequence located from 50 base pairs upstream to 50 base pairs downstream of Exon I, Exon II, Exon III, Exon IV, Exon V, Exon VI, Exon VII, Exon VIII, or Exon IX of the SARM1 gene.

25. The method of claim 23 or 24, wherein the guide sequence portion is complementary to a target sequence located from 30 base pairs upstream to 30 base pairs downstream of an Exon of the SARM1 gene, and
a) the Exon is Exon I and the guide sequence portion comprises a sequence that is the same as or differs by no more than 3 nucleotides from a sequence set forth in any of SEQ ID NOs: 1-56, 301-356, 1348-2223, 57-114, 357-414, 2224-3095, 115-174, 415-474, 3096-3963;
b) the Exon is Exon II, and the guide sequence portion comprises a sequence that is the same as or differs by no more than 3 nucleotides from a sequence set forth in any of SEQ ID NOs: 3964-7683;
c) the Exon is Exon III, and the guide sequence portion comprises a sequence that is the same as or differs by no more than 3 nucleotides from a sequence set forth in any of SEQ ID NOs: 7684-8967;
d) the Exon is Exon IV, and the guide sequence portion comprises a sequence that is the same as or differs by no more than 3 nucleotides from a sequence set forth in any of SEQ ID NOs: 8968-9525;
e) the Exon is Exon V, and the guide sequence portion comprises a sequence that is the same as or differs by no more than 3 nucleotides from a sequence set forth in any of SEQ ID NOs: 9526-10947;
f) the Exon is Exon VI, and the guide sequence portion comprises a sequence that is the same as or differs by no more than 3 nucleotides from a sequence set forth in any of SEQ ID NOs: 10948-11571;
g) the Exon is Exon VII, and the guide sequence portion comprises a sequence that is the same as or differs by no more than 3 nucleotides from a sequence set forth in any of SEQ ID NOs: 11572-12717;
h) the Exon is Exon VIII, and the guide sequence portion comprises a sequence that is the same as or differs by no more than 3 nucleotides from a sequence set forth in any of SEQ ID NOs: 12718-13455; or
i) the Exon is Exon IX, and the guide sequence portion comprises a sequence that is the same as or differs by no more than 3 nucleotides from a sequence set forth in any of SEQ ID NOs: 598-1347.

26. The method of any one of claims 23-25, wherein the guide sequence portion comprises 17-50 contiguous nucleotides containing nucleotides in the sequence set forth in any one of SEQ ID NOs: 1-13457.

27. A medicament comprising SARM1-inhibited or SARM1-inactivated cells for use in treating or preventing a cancer, infection, disease, or disorder in a subject according to the method of any one of claims 1-26.

28. A kit for treating or preventing a cancer, infection, disease, or disorder in a subject, comprising the medicament of claim 27 and instructions for delivering the composition to a subject suffering from or determined to be at risk of suffering from a cancer, infection, disease, or disorder.

29. A method for inactivating alleles of the sterile alpha and toll/interleukin-1 receptor motif-containing 1 (SARM1) gene in a cell, the method comprising
introducing to the cell a composition comprising:
at least one CRISPR nuclease, or a nucleotide molecule encoding a CRISPR nuclease; and
an RNA molecule comprising a guide sequence portion, or a nucleotide molecule encoding the RNA molecule,
wherein a complex of the CRISPR nuclease and the RNA molecule affects a double strand break in alleles of the SARM1 gene,
wherein the guide sequence portion comprises 17-50 contiguous nucleotides containing nucleotides in the sequence set forth in any one of SEQ ID NOs: 1-13457, and
wherein the cell is selected from the group consisting of a hematopoietic stem cell (HSC), induced pluripotent stem cell (iPS cell), iPSc-derived cell, natural killer cell (NK), iPS-derived NK cell (iNK), T cell, innate-like T cell (iT), natural killer T cell (NKT), γδ T cell, iPSc-derived T cell, invariant NKT cell (iNKT), iPSc-derived NKT, monocyte, or macrophage.

30. A cell modified by the method of claim 29, wherein the modified cell comprises at least one inactivated SARM1 allele.

31. The modified cell of claim 30 for use in adoptive cell therapy or prophylaxis.

32. The modified cell of claim 31, wherein the adoptive cell therapy or prophylaxis is to treat or prevent a cancer, infection, disease, or disorder in a subject.

33. A composition, method, process, kit, modified cell, or use as characterized by one or more elements disclosed herein.

The application's sequence listing, which the Patent Office published only in electronic form, follows.

SEQUENCE LISTING (13487 sequences)

SEQ ID NO: 1 - RNA, 20 nt, synthetic construct
  source 1..20: mol_type = other RNA
acacttcgcggggcccgcgg

SEQ ID NO: 2 - RNA, 20 nt, synthetic construct
  source 1..20: mol_type = other RNA
acccgcagcccaccatgggc

SEQ ID NO: 3 - RNA, 20 nt, synthetic construct
  source 1..20: mol_type = other RNA
acgggcccatggtgggctgc

SEQ ID NO: 4 - RNA, 20 nt, synthetic construct
  source 1..20: mol_type = other RNA
acttcgcggggcccgcggcc

SEQ ID NO: 5 - RNA, 20 nt, synthetic construct
  source 1..20: mol_type = other RNA
atggtgggctgcgggtggcc

SEQ ID NO: 6 - RNA, 20 nt, synthetic construct
  source 1..20: mol_type = other RNA
cacccgcagcccaccatggg

SEQ ID NO: 7 - RNA, 20 nt, synthetic construct
  source 1..20: mol_type = other RNA
cacgggcccatggtgggctg

SEQ ID NO: 8 - RNA, 20 nt, synthetic construct
  source 1..20: mol_type = other RNA
cacttcgcggggcccgcggc

SEQ ID NO: 9 - RNA, 20 nt, synthetic construct
  source 1..20: mol_type = other RNA
cagcccaccatgggcccgtg

SEQ ID NO: 10 - RNA, 20 nt, synthetic construct
  source 1..20: mol_type = other RNA
catggtgggctgcgggtggc

SEQ ID NO: 11 - RNA, 20 nt, synthetic construct
  source 1..20: mol_type = other RNA
ccacccgcagcccaccatgg

SEQ ID NO: 12 - RNA, 20 nt, synthetic construct
  source 1..20: mol_type = other RNA
ccatggtgggctgcgggtgg

SEQ ID NO: 13 - RNA, 20 nt, synthetic construct
  source 1..20: mol_type = other RNA
cccatggtgggctgcgggtg

SEQ ID NO: 14 - RNA, 20 nt, synthetic construct
  source 1..20: mol_type = other RNA
cccgcagcccaccatgggcc

SEQ ID NO: 15 - RNA, 20 nt, synthetic construct
  source 1..20: mol_type = other RNA
cccgcggccacccgcagccc

SEQ ID NO: 16 - RNA, 20 nt, synthetic construct
  source 1..20: mol_type = other RNA
ccgcagcccaccatgggccc

SEQ ID NO: 17 - RNA, 20 nt, synthetic construct
  source 1..20: mol_type = other RNA
ccgcggccacccgcagccca

SEQ ID NO: 18 - RNA, 20 nt, synthetic construct
  source 1..20: mol_type = other RNA
cgcagcccaccatgggcccg

SEQ ID NO: 19 - RNA, 20 nt, synthetic construct
  source 1..20: mol_type = other RNA
cgcggccacccgcagcccac

SEQ ID NO: 20 - RNA, 20 nt, synthetic construct
  source 1..20: mol_type = other RNA
cgcggggcccgcggccaccc

SEQ ID NO: 21 - RNA, 20 nt, synthetic construct
  source 1..20: mol_type = other RNA
cggccacccgcagcccacca

SEQ ID NO: 22 - RNA, 20 nt, synthetic construct
  source 1..20: mol_type = other RNA
cgggcccatggtgggctgcg

SEQ ID NO: 23 - RNA, 20 nt, synthetic construct
  source 1..20: mol_type = other RNA
cggggcccgcggccacccgc

SEQ ID NO: 24 - RNA, 20 nt, synthetic construct
  source 1..20: mol_type = other RNA
cggtggcacgggcccatggt

SEQ ID NO: 25 - RNA, 20 nt, synthetic construct
  source 1..20: mol_type = other RNA
ctgcgggtggccgcgggccc

SEQ ID NO: 26 - RNA, 20 nt, synthetic construct
  source 1..20: mol_type = other RNA
cttcgcggggcccgcggcca

SEQ ID NO: 27 - RNA, 20 nt, synthetic construct
  source 1..20: mol_type = other RNA
gcacgggcccatggtgggct

SEQ ID NO: 28 - RNA, 20 nt, synthetic construct
  source 1..20: mol_type = other RNA
gcagcccaccatgggcccgt

SEQ ID NO: 29 - RNA, 20 nt, synthetic construct
  source 1..20: mol_type = other RNA
gccacccgcagcccaccatg

SEQ ID NO: 30 - RNA, 20 nt, synthetic construct
  source 1..20: mol_type = other RNA
gcccatggtgggctgcgggt

SEQ ID NO: 31 - RNA, 20 nt, synthetic construct
  source 1..20: mol_type = other RNA
gcccgcggccacccgcagcc

SEQ ID NO: 32 - RNA, 20 nt, synthetic construct
  source 1..20: mol_type = other RNA
gcggccacccgcagcccacc

SEQ ID NO: 33 - RNA, 20 nt, synthetic construct
  source 1..20: mol_type = other RNA
gcggggcccgcggccacccg

SEQ ID NO: 34 - RNA, 20 nt, synthetic construct
  source 1..20: mol_type = other RNA
gcgggtggccgcgggccccg

SEQ ID NO: 35 - RNA, 20 nt, synthetic construct
  source 1..20: mol_type = other RNA
gcggtggcacgggcccatgg

SEQ ID NO: 36 - RNA, 20 nt, synthetic construct
  source 1..20: mol_type = other RNA
gctgcgggtggccgcgggcc

SEQ ID NO: 37 - RNA, 20 nt, synthetic construct
  source 1..20: mol_type = other RNA
ggcacgggcccatggtgggc

SEQ ID NO: 38 - RNA, 20 nt, synthetic construct
  source 1..20: mol_type = other RNA
ggccacccgcagcccaccat

SEQ ID NO: 39 - RNA, 20 nt, synthetic construct
  source 1..20: mol_type = other RNA
ggcccatggtgggctgcggg

SEQ ID NO: 40 - RNA, 20 nt, synthetic construct
  source 1..20: mol_type = other RNA
ggcccgcggccacccgcagc

SEQ ID NO: 41 - RNA, 20 nt, synthetic construct
  source 1..20: mol_type = other RNA
ggcggtggcacgggcccatg

SEQ ID NO: 42 - RNA, 20 nt, synthetic construct
  source 1..20: mol_type = other RNA
ggctgcgggtggccgcgggc

SEQ ID NO: 43 - RNA, 20 nt, synthetic construct
  source 1..20: mol_type = other RNA
gggcccatggtgggctgcgg

SEQ ID NO: 44 - RNA, 20 nt, synthetic construct
  source 1..20: mol_type = other RNA
gggcccgcggccacccgcag

SEQ ID NO: 45 - RNA, 20 nt, synthetic construct
  source 1..20: mol_type = other RNA
gggctgcgggtggccgcggg

SEQ ID NO: 46 - RNA, 20 nt, synthetic construct
  source 1..20: mol_type = other RNA
ggggcccgcggccacccgca

SEQ ID NO: 47 - RNA, 20 nt, synthetic construct
  source 1..20: mol_type = other RNA
ggtggcacgggcccatggtg

SEQ ID NO: 48 - RNA, 20 nt, synthetic construct
  source 1..20: mol_type = other RNA
ggtgggctgcgggtggccgc

SEQ ID NO: 49 - RNA, 20 nt, synthetic construct
  source 1..20: mol_type = other RNA
gtggcacgggcccatggtgg

SEQ ID NO: 50 - RNA, 20 nt, synthetic construct
  source 1..20: mol_type = other RNA
gtgggctgcgggtggccgcg

SEQ ID NO: 51 - RNA, 20 nt, synthetic construct
  source 1..20: mol_type = other RNA
tcgcggggcccgcggccacc

SEQ ID NO: 52 - RNA, 20 nt, synthetic construct
  source 1..20: mol_type = other RNA
tgcgggtggccgcgggcccc

SEQ ID NO: 53 - RNA, 20 nt, synthetic construct
  source 1..20: mol_type = other RNA
tggcacgggcccatggtggg

SEQ ID NO: 54 - RNA, 20 nt, synthetic construct
  source 1..20: mol_type = other RNA
tgggctgcgggtggccgcgg

SEQ ID NO: 55 - RNA, 20 nt, synthetic construct
  source 1..20: mol_type = other RNA
tggtgggctgcgggtggccg

SEQ ID NO: 56 - RNA, 20 nt, synthetic construct
  source 1..20: mol_type = other RNA
ttcgcggggcccgcggccac

SEQ ID NO: 57 - RNA, 21 nt, synthetic construct
  source 1..21: mol_type = other RNA
acacttcgcggggcccgcggc

SEQ ID NO: 58 - RNA, 21 nt, synthetic construct
  source 1..21: mol_type = other RNA
acccgcagcccaccatgggcc

SEQ ID NO: 59 - RNA, 21 nt, synthetic construct
  source 1..21: mol_type = other RNA
acgggcccatggtgggctgcg

SEQ ID NO: 60 - RNA, 21 nt, synthetic construct
  source 1..21: mol_type = other RNA
acttcgcggggcccgcggcca

SEQ ID NO: 61 - RNA, 21 nt, synthetic construct
  source 1..21: mol_type = other RNA
atggtgggctgcgggtggccg

SEQ ID NO: 62 - RNA, 21 nt, synthetic construct
  source 1..21: mol_type = other RNA
cacccgcagcccaccatgggc

SEQ ID NO: 63 - RNA, 21 nt, synthetic construct
  source 1..21: mol_type = other RNA
cacgggcccatggtgggctgc

SEQ ID NO: 64 - RNA, 21 nt, synthetic construct
  source 1..21: mol_type = other RNA
cacttcgcggggcccgcggcc

SEQ ID NO: 65 - RNA, 21 nt, synthetic construct
  source 1..21: mol_type = other RNA
cagcccaccatgggcccgtgc

SEQ ID NO: 66 - RNA, 21 nt, synthetic construct
  source 1..21: mol_type = other RNA
catggtgggctgcgggtggcc

SEQ ID NO: 67 - RNA, 21 nt, synthetic construct
  source 1..21: mol_type = other RNA
ccacccgcagcccaccatggg

SEQ ID NO: 68 - RNA, 21 nt, synthetic construct
  source 1..21: mol_type = other RNA
ccatggtgggctgcgggtggc

SEQ ID NO: 69 - RNA, 21 nt, synthetic construct
  source 1..21: mol_type = other RNA
cccatggtgggctgcgggtgg

SEQ ID NO: 70 - RNA, 21 nt, synthetic construct
  source 1..21: mol_type = other RNA
cccgcagcccaccatgggccc

SEQ ID NO: 71 - RNA, 21 nt, synthetic construct
  source 1..21: mol_type = other RNA
cccgcggccacccgcagccca

SEQ ID NO: 72 - RNA, 21 nt, synthetic construct
  source 1..21: mol_type = other RNA
ccgcagcccaccatgggcccg

SEQ ID NO: 73 - RNA, 21 nt, synthetic construct
  source 1..21: mol_type = other RNA
ccgcggccacccgcagcccac

SEQ ID NO: 74 - RNA, 21 nt, synthetic construct
  source 1..21: mol_type = other RNA
cgcagcccaccatgggcccgt

SEQ ID NO: 75 - RNA, 21 nt, synthetic construct
  source 1..21: mol_type = other RNA
cgcggccacccgcagcccacc

SEQ ID NO: 76 - RNA, 21 nt, synthetic construct
  source 1..21: mol_type = other RNA
cgcggggcccgcggccacccg

SEQ ID NO: 77 - RNA, 21 nt, synthetic construct
  source 1..21: mol_type = other RNA
cggccacccgcagcccaccat

SEQ ID NO: 78 - RNA, 21 nt, synthetic construct
  source 1..21: mol_type = other RNA
cgggcccatggtgggctgcgg

SEQ ID NO: 79 - RNA, 21 nt, synthetic construct
  source 1..21: mol_type = other RNA
cggggcccgcggccacccgca

SEQ ID NO: 80 - RNA, 21 nt, synthetic construct
  source 1..21: mol_type = other RNA
cggtggcacgggcccatggtg

SEQ ID NO: 81 - RNA, 21 nt, synthetic construct
  source 1..21: mol_type = other RNA
ctgcgggtggccgcgggcccc

SEQ ID NO: 82 - RNA, 21 nt, synthetic construct
  source 1..21: mol_type = other RNA
cttcgcggggcccgcggccac

SEQ ID NO: 83 - RNA, 21 nt, synthetic construct
  source 1..21: mol_type = other RNA
gacacttcgcggggcccgcgg

SEQ ID NO: 84 - RNA, 21 nt, synthetic construct
  source 1..21: mol_type = other RNA
gcacgggcccatggtgggctg

SEQ ID NO: 85 - RNA, 21 nt, synthetic construct
  source 1..21: mol_type = other RNA
gcagcccaccatgggcccgtg

SEQ ID NO: 86 - RNA, 21 nt, synthetic construct
  source 1..21: mol_type = other RNA
gccacccgcagcccaccatgg

SEQ ID NO: 87 - RNA, 21 nt, synthetic construct
  source 1..21: mol_type = other RNA
gcccatggtgggctgcgggtg

SEQ ID NO: 88 - RNA, 21 nt, synthetic construct
  source 1..21: mol_type = other RNA
gcccgcggccacccgcagccc

SEQ ID NO: 89 - RNA, 21 nt, synthetic construct
  source 1..21: mol_type = other RNA
gcggccacccgcagcccacca

SEQ ID NO: 90 - RNA, 21 nt, synthetic construct
  source 1..21: mol_type = other RNA
gcggggcccgcggccacccgc

SEQ ID NO: 91 - RNA, 21 nt, synthetic construct
  source 1..21: mol_type = other RNA
gcgggtggccgcgggccccgc

SEQ ID NO: 92 - RNA, 21 nt, synthetic construct
  source 1..21: mol_type = other RNA
gcggtggcacgggcccatggt

SEQ ID NO: 93 - RNA, 21 nt, synthetic construct
  source 1..21: mol_type = other RNA
gctgcgggtggccgcgggccc

SEQ ID NO: 94 - RNA, 21 nt, synthetic construct
  source 1..21: mol_type = other RNA
ggcacgggcccatggtgggct

SEQ ID NO: 95 - RNA, 21 nt, synthetic construct
  source 1..21: mol_type = other RNA
ggccacccgcagcccaccatg

SEQ ID NO: 96 - RNA, 21 nt, synthetic construct
  source 1..21: mol_type = other RNA
ggcccatggtgggctgcgggt

SEQ ID NO: 97 - RNA, 21 nt, synthetic construct
  source 1..21: mol_type = other RNA
ggcccgcggccacccgcagcc

SEQ ID NO: 98 - RNA, 21 nt, synthetic construct
  source 1..21: mol_type = other RNA
ggcggtggcacgggcccatgg

SEQ ID NO: 99 - RNA, 21 nt, synthetic construct
  source 1..21: mol_type = other RNA
ggctgcgggtggccgcgggcc

SEQ ID NO: 100 - RNA, 21 nt, synthetic construct
  source 1..21: mol_type = other RNA
gggcccatggtgggctgcggg

SEQ ID NO: 101 - RNA, 21 nt, synthetic construct
  source 1..21: mol_type = other RNA
gggcccgcggccacccgcagc

SEQ ID NO: 102 - RNA, 21 nt, synthetic construct
  source 1..21: mol_type = other RNA
gggcggtggcacgggcccatg

SEQ ID NO: 103 - RNA, 21 nt, synthetic construct
  source 1..21: mol_type = other RNA
gggctgcgggtggccgcgggc

SEQ ID NO: 104 - RNA, 21 nt, synthetic construct
  source 1..21: mol_type = other RNA
ggggcccgcggccacccgcag

SEQ ID NO: 105 - RNA, 21 nt, synthetic construct
  source 1..21: mol_type = other RNA
ggtggcacgggcccatggtgg

SEQ ID NO: 106 - RNA, 21 nt, synthetic construct
  source 1..21: mol_type = other RNA
ggtgggctgcgggtggccgcg

SEQ ID NO: 107 - RNA, 21 nt, synthetic construct
  source 1..21: mol_type = other RNA
gtggcacgggcccatggtggg

SEQ ID NO: 108 - RNA, 21 nt, synthetic construct
  source 1..21: mol_type = other RNA
gtgggctgcgggtggccgcgg

SEQ ID NO: 109 - RNA, 21 nt, synthetic construct
  source 1..21: mol_type = other RNA
tcgcggggcccgcggccaccc

SEQ ID NO: 110 - RNA, 21 nt, synthetic construct
  source 1..21: mol_type = other RNA
tgcgggtggccgcgggccccg

SEQ ID NO: 111 - RNA, 21 nt, synthetic construct
  source 1..21: mol_type = other RNA
tggcacgggcccatggtgggc

SEQ ID NO: 112 - RNA, 21 nt, synthetic construct
  source 1..21: mol_type = other RNA
tgggctgcgggtggccgcggg

SEQ ID NO: 113 - RNA, 21 nt, synthetic construct
  source 1..21: mol_type = other RNA
tggtgggctgcgggtggccgc

SEQ ID NO: 114 - RNA, 21 nt, synthetic construct
  source 1..21: mol_type = other RNA
ttcgcggggcccgcggccacc

SEQ ID NO: 115 - RNA, 22 nt, synthetic construct
  source 1..22: mol_type = other RNA
acacttcgcggggcccgcggcc

SEQ ID NO: 116 - RNA, 22 nt, synthetic construct
  source 1..22: mol_type = other RNA
acccgcagcccaccatgggccc

SEQ ID NO: 117 - RNA, 22 nt, synthetic construct
  source 1..22: mol_type = other RNA
acgggcccatggtgggctgcgg

SEQ ID NO: 118 - RNA, 22 nt, synthetic construct
  source 1..22: mol_type = other RNA
acttcgcggggcccgcggccac

SEQ ID NO: 119 - RNA, 22 nt, synthetic construct
  source 1..22: mol_type = other RNA
atggtgggctgcgggtggccgc

SEQ ID NO: 120 - RNA, 22 nt, synthetic construct
  source 1..22: mol_type = other RNA
cacccgcagcccaccatgggcc

SEQ ID NO: 121 - RNA, 22 nt, synthetic construct
  source 1..22: mol_type = other RNA
cacgggcccatggtgggctgcg

SEQ ID NO: 122 - RNA, 22 nt, synthetic construct
  source 1..22: mol_type = other RNA
cacttcgcggggcccgcggcca

SEQ ID NO: 123 - RNA, 22 nt, synthetic construct
  source 1..22: mol_type = other RNA
cagcccaccatgggcccgtgcc

SEQ ID NO: 124 - RNA, 22 nt, synthetic construct
  source 1..22: mol_type = other RNA
catggtgggctgcgggtggccg

SEQ ID NO: 125 - RNA, 22 nt, synthetic construct
  source 1..22: mol_type = other RNA
ccacccgcagcccaccatgggc

SEQ ID NO: 126 - RNA, 22 nt, synthetic construct
  source 1..22: mol_type = other RNA
ccatggtgggctgcgggtggcc

SEQ ID NO: 127 - RNA, 22 nt, synthetic construct
  source 1..22: mol_type = other RNA
cccatggtgggctgcgggtggc

SEQ ID NO: 128 - RNA, 22 nt, synthetic construct
  source 1..22: mol_type = other RNA
cccgcagcccaccatgggcccg

SEQ ID NO: 129 - RNA, 22 nt, synthetic construct
  source 1..22: mol_type = other RNA
cccgcggccacccgcagcccac

SEQ ID NO: 130 - RNA, 22 nt, synthetic construct
  source 1..22: mol_type = other RNA
ccgcagcccaccatgggcccgt

SEQ ID NO: 131 - RNA, 22 nt, synthetic construct
  source 1..22: mol_type = other RNA
ccgcggccacccgcagcccacc

SEQ ID NO: 132 - RNA, 22 nt, synthetic construct
  source 1..22: mol_type = other RNA
cgacacttcgcggggcccgcgg

SEQ ID NO: 133 - RNA, 22 nt, synthetic construct
  source 1..22: mol_type = other RNA
cgcagcccaccatgggcccgtg

SEQ ID NO: 134 - RNA, 22 nt, synthetic construct
  source 1..22: mol_type = other RNA
cgcggccacccgcagcccacca

SEQ ID NO: 135 - RNA, 22 nt, synthetic construct
  source 1..22: mol_type = other RNA
cgcggggcccgcggccacccgc

SEQ ID NO: 136 - RNA, 22 nt, synthetic construct
  source 1..22: mol_type = other RNA
cggccacccgcagcccaccatg

SEQ ID NO: 137 - RNA, 22 nt, synthetic construct
  source 1..22: mol_type = other RNA
cgggcccatggtgggctgcggg

SEQ ID NO: 138 - RNA, 22 nt, synthetic construct
  source 1..22: mol_type = other RNA
cggggcccgcggccacccgcag

SEQ ID NO: 139 - RNA, 22 nt, synthetic construct
  source 1..22: mol_type = other RNA
cggtggcacgggcccatggtgg

SEQ ID NO: 140 - RNA, 22 nt, synthetic construct
  source 1..22: mol_type = other RNA
ctgcgggtggccgcgggccccg

SEQ ID NO: 141 - RNA, 22 nt, synthetic construct
  source 1..22: mol_type = other RNA
cttcgcggggcccgcggccacc

SEQ ID NO: 142 - RNA, 22 nt, synthetic construct
  source 1..22: mol_type = other RNA
gacacttcgcggggcccgcggc

SEQ ID NO: 143 - RNA, 22 nt, synthetic construct
  source 1..22: mol_type = other RNA
gcacgggcccatggtgggctgc

SEQ ID NO: 144 - RNA, 22 nt, synthetic construct
  source 1..22: mol_type = other RNA
gcagcccaccatgggcccgtgc

SEQ ID NO: 145 - RNA, 22 nt, synthetic construct
  source 1..22: mol_type = other RNA
gccacccgcagcccaccatggg

SEQ ID NO: 146 - RNA, 22 nt, synthetic construct
  source 1..22: mol_type = other RNA
gcccatggtgggctgcgggtgg

SEQ ID NO: 147 - RNA, 22 nt, synthetic construct
  source 1..22: mol_type = other RNA
gcccgcggccacccgcagccca

SEQ ID NO: 148 - RNA, 22 nt, synthetic construct
  source 1..22: mol_type = other RNA
gcggccacccgcagcccaccat

SEQ ID NO: 149 - RNA, 22 nt, synthetic construct
  source 1..22: mol_type = other RNA
gcggggcccgcggccacccgca

SEQ ID NO: 150 - RNA, 22 nt, synthetic construct
  source 1..22: mol_type = other RNA
gcgggtggccgcgggccccgcg

SEQ ID NO: 151 - RNA, 22 nt, synthetic construct
  source 1..22: mol_type = other RNA
gcggtggcacgggcccatggtg

SEQ ID NO: 152 - RNA, 22 nt, synthetic construct
  source 1..22: mol_type = other RNA
gctgcgggtggccgcgggcccc

SEQ ID NO: 153 - RNA, 22 nt, synthetic construct
  source 1..22: mol_type = other RNA
ggcacgggcccatggtgggctg

SEQ ID NO: 154 - RNA, 22 nt, synthetic construct
  source 1..22: mol_type = other RNA
ggccacccgcagcccaccatgg

SEQ ID NO: 155 - RNA, 22 nt, synthetic construct
  source 1..22: mol_type = other RNA
ggcccatggtgggctgcgggtg

SEQ ID NO: 156 - RNA, 22 nt, synthetic construct
  source 1..22: mol_type = other RNA
ggcccgcggccacccgcagccc

SEQ ID NO: 157 - RNA, 22 nt, synthetic construct
  source 1..22: mol_type = other RNA
ggcggtggcacgggcccatggt

SEQ ID NO: 158 - RNA, 22 nt, synthetic construct
  source 1..22: mol_type = other RNA
ggctgcgggtggccgcgggccc

SEQ ID NO: 159 - RNA, 22 nt, synthetic construct
  source 1..22: mol_type = other RNA
gggcccatggtgggctgcgggt

SEQ ID NO: 160 - RNA, 22 nt, synthetic construct
  source 1..22: mol_type = other RNA
gggcccgcggccacccgcagcc

SEQ ID NO: 161 - RNA, 22 nt, synthetic construct
  source 1..22: mol_type = other RNA
gggcggtggcacgggcccatgg

SEQ ID NO: 162 - RNA, 22 nt, synthetic construct
  source 1..22: mol_type = other RNA
gggctgcgggtggccgcgggcc

SEQ ID NO: 163 - RNA, 22 nt, synthetic construct
  source 1..22: mol_type = other RNA
ggggcccgcggccacccgcagc

SEQ ID NO: 164 - RNA, 22 nt, synthetic construct
  source 1..22: mol_type = other RNA
ggggcggtggcacgggcccatg

SEQ ID NO: 165 - RNA, 22 nt, synthetic construct
  source 1..22: mol_type = other RNA
ggtggcacgggcccatggtggg

SEQ ID NO: 166 - RNA, 22 nt, synthetic construct
  source 1..22: mol_type = other RNA
ggtgggctgcgggtggccgcgg

SEQ ID NO: 167 - RNA, 22 nt, synthetic construct
  source 1..22: mol_type = other RNA
gtggcacgggcccatggtgggc

SEQ ID NO: 168 - RNA, 22 nt, synthetic construct
  source 1..22: mol_type = other RNA
gtgggctgcgggtggccgcggg

SEQ ID NO: 169 - RNA, 22 nt, synthetic construct
  source 1..22: mol_type = other RNA
tcgcggggcccgcggccacccg

SEQ ID NO: 170 - RNA, 22 nt, synthetic construct
  source 1..22: mol_type = other RNA
tgcgggtggccgcgggccccgc

SEQ ID NO: 171 - RNA, 22 nt, synthetic construct
  source 1..22: mol_type = other RNA
tggcacgggcccatggtgggct

SEQ ID NO: 172 - RNA, 22 nt, synthetic construct
  source 1..22: mol_type = other RNA
tgggctgcgggtggccgcgggc

SEQ ID NO: 173 - RNA, 22 nt, synthetic construct
  source 1..22: mol_type = other RNA
tggtgggctgcgggtggccgcg

SEQ ID NO: 174 - RNA, 22 nt, synthetic construct
  source 1..22: mol_type = other RNA
ttcgcggggcccgcggccaccc

SEQ ID NO: 175 - RNA, 20 nt, synthetic construct
  source 1..20: mol_type = other RNA
acccggagcccaccatgggc

SEQ ID NO: 176 - RNA, 20 nt, synthetic construct
  source 1..20: mol_type = other RNA
acgggcccatggtgggctcc

SEQ ID NO: 177 - RNA, 20 nt, synthetic construct
  source 1..20: mol_type = other RNA
atggtgggctccgggtggcc

SEQ ID NO: 178 - RNA, 20 nt, synthetic construct
  source 1..20: mol_type = other RNA
cacccggagcccaccatggg

SEQ ID NO: 179 - RNA, 20 nt, synthetic construct
  source 1..20: mol_type = other RNA
cacgggcccatggtgggctc

SEQ ID NO: 180 - RNA, 20 nt, synthetic construct
  source 1..20: mol_type = other RNA
catggtgggctccgggtggc

SEQ ID NO: 181 - RNA, 20 nt, synthetic construct
  source 1..20: mol_type = other RNA
ccacccggagcccaccatgg

SEQ ID NO: 182 - RNA, 20 nt, synthetic construct
  source 1..20: mol_type = other RNA
ccatggtgggctccgggtgg

SEQ ID NO: 183 - RNA, 20 nt, synthetic construct
  source 1..20: mol_type = other RNA
cccatggtgggctccgggtg

SEQ ID NO: 184 - RNA, 20 nt, synthetic construct
  source 1..20: mol_type = other RNA
cccgcggccacccggagccc

SEQ ID NO: 185 - RNA, 20 nt, synthetic construct
  source 1..20: mol_type = other RNA
cccggagcccaccatgggcc

SEQ ID NO: 186 - RNA, 20 nt, synthetic construct
  source 1..20: mol_type = other RNA
ccgcggccacccggagccca

SEQ ID NO: 187 - RNA, 20 nt, synthetic construct
  source 1..20: mol_type = other RNA
ccggagcccaccatgggccc

SEQ ID NO: 188 - RNA, 20 nt, synthetic construct
  source 1..20: mol_type = other RNA
ccgggtggccgcgggccccg

SEQ ID NO: 189 - RNA, 20 nt, synthetic construct
  source 1..20: mol_type = other RNA
cgcggccacccggagcccac

SEQ ID NO: 190 - RNA, 20 nt, synthetic construct
  source 1..20: mol_type = other RNA
cggagcccaccatgggcccg

SEQ ID NO: 191 - RNA, 20 nt, synthetic construct
  source 1..20: mol_type = other RNA
cggccacccggagcccacca

SEQ ID NO: 192 - RNA, 20 nt, synthetic construct
  source 1..20: mol_type = other RNA
cgggcccatggtgggctccg

SEQ ID NO: 193 - RNA, 20 nt, synthetic construct
  source 1..20: mol_type = other RNA
cggggcccgcggccacccgg

SEQ ID NO: 194 - RNA, 20 nt, synthetic construct
  source 1..20: mol_type = other RNA
ctccgggtggccgcgggccc

SEQ ID NO: 195 - RNA, 20 nt, synthetic construct
  source 1..20: mol_type = other RNA
gagcccaccatgggcccgtg

SEQ ID NO: 196 - RNA, 20 nt, synthetic construct
  source 1..20: mol_type = other RNA
gccacccggagcccaccatg

SEQ ID NO: 197 - RNA, 20 nt, synthetic construct
  source 1..20: mol_type = other RNA
gcccatggtgggctccgggt

SEQ ID NO: 198 - RNA, 20 nt, synthetic construct
  source 1..20: mol_type = other RNA
gcccgcggccacccggagcc

SEQ ID NO: 199 - RNA, 20 nt, synthetic construct
  source 1..20: mol_type = other RNA
gcggccacccggagcccacc

SEQ ID NO: 200 - RNA, 20 nt, synthetic construct
  source 1..20: mol_type = other RNA
gctccgggtggccgcgggcc

SEQ ID NO: 201 - RNA, 20 nt, synthetic construct
  source 1..20: mol_type = other RNA
ggagcccaccatgggcccgt

SEQ ID NO: 202 - RNA, 20 nt, synthetic construct
  source 1..20: mol_type = other RNA
ggccacccggagcccaccat

SEQ ID NO: 203 - RNA, 20 nt, synthetic construct
  source 1..20: mol_type = other RNA
ggcccatggtgggctccggg

SEQ ID NO: 204 - RNA, 20 nt, synthetic construct
  source 1..20: mol_type = other RNA
ggcccgcggccacccggagc

SEQ ID NO: 205 - RNA, 20 nt, synthetic construct
  source 1..20: mol_type = other RNA
ggctccgggtggccgcgggc

SEQ ID NO: 206 - RNA, 20 nt, synthetic construct
  source 1..20: mol_type = other RNA
gggcccatggtgggctccgg

SEQ ID NO: 207 - RNA, 20 nt, synthetic construct
  source 1..20: mol_type = other RNA
gggcccgcggccacccggag

SEQ ID NO: 208 - RNA, 20 nt, synthetic construct
  source 1..20: mol_type = other RNA
gggctccgggtggccgcggg

SEQ ID NO: 209 - RNA, 20 nt, synthetic construct
  source 1..20: mol_type = other RNA
ggggcccgcggccacccgga

SEQ ID NO: 210 - RNA, 20 nt, synthetic construct
  source 1..20: mol_type = other RNA
ggtgggctccgggtggccgc

SEQ ID NO: 211 - RNA, 20 nt, synthetic construct
  source 1..20: mol_type = other RNA
gtgggctccgggtggccgcg

SEQ ID NO: 212 - RNA, 20 nt, synthetic construct
  source 1..20: mol_type = other RNA
tccgggtggccgcgggcccc

SEQ ID NO: 213 - RNA, 20 nt, synthetic construct
  source 1..20: mol_type = other RNA
tgggctccgggtggccgcgg

SEQ ID NO: 214 - RNA, 20 nt, synthetic construct
  source 1..20: mol_type = other RNA
tggtgggctccgggtggccg

SEQ ID NO: 215 - RNA, 21 nt, synthetic construct
  source 1..21: mol_type = other RNA
acccggagcccaccatgggcc

SEQ ID NO: 216 - RNA, 21 nt, synthetic construct
  source 1..21: mol_type = other RNA
acgggcccatggtgggctccg

SEQ ID NO: 217 - RNA, 21 nt, synthetic construct
  source 1..21: mol_type = other RNA
atggtgggctccgggtggccg

SEQ ID NO: 218 - RNA, 21 nt, synthetic construct
  source 1..21: mol_type = other RNA
cacccggagcccaccatgggc

SEQ ID NO: 219 - RNA, 21 nt, synthetic construct
  source 1..21: mol_type = other RNA
cacgggcccatggtgggctcc

SEQ ID NO: 220 - RNA, 21 nt, synthetic construct
  source 1..21: mol_type = other RNA
catggtgggctccgggtggcc

SEQ ID NO: 221 - RNA, 21 nt, synthetic construct
  source 1..21: mol_type = other RNA
ccacccggagcccaccatggg

SEQ ID NO: 222 - RNA, 21 nt, synthetic construct
  source 1..21: mol_type = other RNA
ccatggtgggctccgggtggc

SEQ ID NO: 223 - RNA, 21 nt, synthetic construct
  source 1..21: mol_type = other RNA
cccatggtgggctccgggtgg

SEQ ID NO: 224 - RNA, 21 nt, synthetic construct
  source 1..21: mol_type = other RNA
cccgcggccacccggagccca

SEQ ID NO: 225 - RNA, 21 nt, synthetic construct
  source 1..21: mol_type = other RNA
cccggagcccaccatgggccc

SEQ ID NO: 226 - RNA, 21 nt, synthetic construct
  source 1..21: mol_type = other RNA
ccgcggccacccggagcccac

SEQ ID NO: 227 - RNA, 21 nt, synthetic construct
  source 1..21: mol_type = other RNA
ccggagcccaccatgggcccg

SEQ ID NO: 228 - RNA, 21 nt, synthetic construct
  source 1..21: mol_type = other RNA
ccgggtggccgcgggccccgc

SEQ ID NO: 229 - RNA, 21 nt, synthetic construct
  source 1..21: mol_type = other RNA
cgcggccacccggagcccacc

SEQ ID NO: 230 - RNA, 21 nt, synthetic construct
  source 1..21: mol_type = other RNA
cggagcccaccatgggcccgt

SEQ ID NO: 231 - RNA, 21 nt, synthetic construct
  source 1..21: mol_type = other RNA
cggccacccggagcccaccat

SEQ ID NO: 232 - RNA, 21 nt, synthetic construct
  source 1..21: mol_type = other RNA
cgggcccatggtgggctccgg

SEQ ID NO: 233 - RNA, 21 nt, synthetic construct
  source 1..21: mol_type = other RNA
cggggcccgcggccacccgga

SEQ ID NO: 234 - RNA, 21 nt, synthetic construct
  source 1..21: mol_type = other RNA
ctccgggtggccgcgggcccc

SEQ ID NO: 235 - RNA, 21 nt, synthetic construct
  source 1..21: mol_type = other RNA
gagcccaccatgggcccgtgc

SEQ ID NO: 236 - RNA, 21 nt, synthetic construct
  source 1..21: mol_type = other RNA
gcacgggcccatggtgggctc

SEQ ID NO: 237 - RNA, 21 nt, synthetic construct
  source 1..21: mol_type = other RNA
gccacccggagcccaccatgg

SEQ ID NO: 238 - RNA, 21 nt, synthetic construct
  source 1..21: mol_type = other RNA
gcccatggtgggctccgggtg

SEQ ID NO: 239 - RNA, 21 nt, synthetic construct
  source 1..21: mol_type = other RNA
gcccgcggccacccggagccc

SEQ ID NO: 240 - RNA, 21 nt, synthetic construct
  source 1..21: mol_type = other RNA
gcggccacccggagcccacca

SEQ ID NO: 241 - RNA, 21 nt, synthetic construct
  source 1..21: mol_type = other RNA
gcggggcccgcggccacccgg

SEQ ID NO: 242 - RNA, 21 nt, synthetic construct
  source 1..21: mol_type = other RNA
gctccgggtggccgcgggccc

SEQ ID NO: 243 - RNA, 21 nt, synthetic construct
  source 1..21: mol_type = other RNA
ggagcccaccatgggcccgtg

SEQ ID NO: 244 - RNA, 21 nt, synthetic construct
  source 1..21: mol_type = other RNA
ggccacccggagcccaccatg

SEQ ID NO: 245 - RNA, 21 nt, synthetic construct
  source 1..21: mol_type = other RNA
ggcccatggtgggctccgggt

SEQ ID NO: 246 - RNA, 21 nt, synthetic construct
  source 1..21: mol_type = other RNA
ggcccgcggccacccggagcc

SEQ ID NO: 247 - RNA, 21 nt, synthetic construct
  source 1..21: mol_type = other RNA
ggctccgggtggccgcgggcc

SEQ ID NO: 248 - RNA, 21 nt, synthetic construct
  source 1..21: mol_type = other RNA
gggcccatggtgggctccggg

SEQ ID NO: 249 - RNA, 21 nt, synthetic construct
  source 1..21: mol_type = other RNA
gggcccgcggccacccggagc

SEQ ID NO: 250 - RNA, 21 nt, synthetic construct
  source 1..21: mol_type = other RNA
gggctccgggtggccgcgggc

SEQ ID NO: 251 - RNA, 21 nt, synthetic construct
  source 1..21: mol_type = other RNA
ggggcccgcggccacccggag

SEQ ID NO: 252 - RNA, 21 nt, synthetic construct
  source 1..21: mol_type = other RNA
ggtgggctccgggtggccgcg

SEQ ID NO: 253 - RNA, 21 nt, synthetic construct
  source 1..21: mol_type = other RNA
gtgggctccgggtggccgcgg

SEQ ID NO: 254 - RNA, 21 nt, synthetic construct
  source 1..21: mol_type = other RNA
tccgggtggccgcgggccccg

SEQ ID NO: 255 - RNA, 21 nt, synthetic construct
  source 1..21: mol_type = other RNA
tgggctccgggtggccgcggg

SEQ ID NO: 256 - RNA, 21 nt, synthetic construct
  source 1..21: mol_type = other RNA
tggtgggctccgggtggccgc

SEQ ID NO: 257 - RNA, 22 nt, synthetic construct
  source 1..22: mol_type = other RNA
acccggagcccaccatgggccc

SEQ ID NO: 258 - RNA, 22 nt, synthetic construct
  source 1..22: mol_type = other RNA
acgggcccatggtgggctccgg

SEQ ID NO: 259 - RNA, 22 nt, synthetic construct
  source 1..22: mol_type = other RNA
atggtgggctccgggtggccgc

SEQ ID NO: 260 - RNA, 22 nt, synthetic construct
  source 1..22: mol_type = other RNA
cacccggagcccaccatgggcc

SEQ ID NO: 261 - RNA, 22 nt, synthetic construct
  source 1..22: mol_type = other RNA
cacgggcccatggtgggctccg

SEQ ID NO: 262 - RNA, 22 nt, synthetic construct
  source 1..22: mol_type = other RNA
catggtgggctccgggtggccg

SEQ ID NO: 263 - RNA, 22 nt, synthetic construct
  source 1..22: mol_type = other RNA
ccacccggagcccaccatgggc

SEQ ID NO: 264 - RNA, 22 nt, synthetic construct
  source 1..22: mol_type = other RNA
ccatggtgggctccgggtggcc

SEQ ID NO: 265 - RNA, 22 nt, synthetic construct
  source 1..22: mol_type = other RNA
cccatggtgggctccgggtggc

SEQ ID NO: 266 - RNA, 22 nt, synthetic construct
  source 1..22: mol_type = other RNA
cccgcggccacccggagcccac

SEQ ID NO: 267 - RNA, 22 nt, synthetic construct
  source 1..22: mol_type = other RNA
cccggagcccaccatgggcccg

SEQ ID NO: 268 - RNA, 22 nt, synthetic construct
  source 1..22: mol_type = other RNA
ccgcggccacccggagcccacc

SEQ ID NO: 269 - RNA, 22 nt, synthetic construct
  source 1..22: mol_type = other RNA
ccggagcccaccatgggcccgt

SEQ ID NO: 270 - RNA, 22 nt, synthetic construct
  source 1..22: mol_type = other RNA
ccgggtggccgcgggccccgcg

SEQ ID NO: 271 - RNA, 22 nt, synthetic construct
  source 1..22: mol_type = other RNA
cgcggccacccggagcccacca

SEQ ID NO: 272 - RNA, 22 nt, synthetic construct
  source 1..22: mol_type = other RNA
cgcggggcccgcggccacccgg

SEQ ID NO: 273 - RNA, 22 nt, synthetic construct
  source 1..22: mol_type = other RNA
cggagcccaccatgggcccgtg

SEQ ID NO: 274 - RNA, 22 nt, synthetic construct
  source 1..22: mol_type = other RNA
cggccacccggagcccaccatg

SEQ ID NO: 275 - RNA, 22 nt, synthetic construct
  source 1..22: mol_type = other RNA
cgggcccatggtgggctccggg

SEQ ID NO: 276 - RNA, 22 nt, synthetic construct
  source 1..22: mol_type = other RNA
cggggcccgcggccacccggag

SEQ ID NO: 277 - RNA, 22 nt, synthetic construct
  source 1..22: mol_type = other RNA
ctccgggtggccgcgggccccg

SEQ ID NO: 278 - RNA, 22 nt, synthetic construct
  source 1..22: mol_type = other RNA
gagcccaccatgggcccgtgcc

SEQ ID NO: 279 - RNA, 22 nt, synthetic construct
  source 1..22: mol_type = other RNA
gcacgggcccatggtgggctcc

SEQ ID NO: 280 - RNA, 22 nt, synthetic construct
  source 1..22: mol_type = other RNA
gccacccggagcccaccatggg

SEQ ID NO: 281 - RNA, 22 nt, synthetic construct
  source 1..22: mol_type = other RNA
gcccatggtgggctccgggtgg

SEQ ID NO: 282 - RNA, 22 nt, synthetic construct
  source 1..22: mol_type = other RNA
gcccgcggccacccggagccca

SEQ ID NO: 283 - RNA, 22 nt, synthetic construct
  source 1..22: mol_type = other RNA
gcggccacccggagcccaccat

SEQ ID NO: 284 - RNA, 22 nt, synthetic construct
  source 1..22: mol_type = other RNA
gcggggcccgcggccacccgga

SEQ ID NO: 285 - RNA, 22 nt, synthetic construct
  source 1..22: mol_type = other RNA
gctccgggtggccgcgggcccc

SEQ ID NO: 286 - RNA, 22 nt, synthetic construct
  source 1..22: mol_type = other RNA
ggagcccaccatgggcccgtgc

SEQ ID NO: 287 - RNA, 22 nt, synthetic construct
  source 1..22: mol_type = other RNA
ggcacgggcccatggtgggctc

SEQ ID NO: 288 - RNA, 22 nt, synthetic construct
  source 1..22: mol_type = other RNA
ggccacccggagcccaccatgg

SEQ ID NO: 289 - RNA, 22 nt, synthetic construct
  source 1..22: mol_type = other RNA
ggcccatggtgggctccgggtg

SEQ ID NO: 290 - RNA, 22 nt, synthetic construct
  source 1..22: mol_type = other RNA
ggcccgcggccacccggagccc

SEQ ID NO: 291 - RNA, 22 nt, synthetic construct
  source 1..22: mol_type = other RNA
ggctccgggtggccgcgggccc

SEQ ID NO: 292 - RNA, 22 nt, synthetic construct
  source 1..22: mol_type = other RNA
gggcccatggtgggctccgggt

SEQ ID NO: 293 - RNA, 22 nt, synthetic construct
  source 1..22: mol_type = other RNA
gggcccgcggccacccggagcc

SEQ ID NO: 294 - RNA, 22 nt, synthetic construct
  source 1..22: mol_type = other RNA
gggctccgggtggccgcgggcc

SEQ ID NO: 295 - RNA, 22 nt, synthetic construct
  source 1..22: mol_type = other RNA
ggggcccgcggccacccggagc

SEQ ID NO: 296 - RNA, 22 nt, synthetic construct
  source 1..22: mol_type = other RNA
ggtgggctccgggtggccgcgg

SEQ ID NO: 297 - RNA, 22 nt, synthetic construct
  source 1..22: mol_type = other RNA
gtgggctccgggtggccgcggg

SEQ ID NO: 298 - RNA, 22 nt, synthetic construct
  source 1..22: mol_type = other RNA
tccgggtggccgcgggccccgc

SEQ ID NO: 299 - RNA, 22 nt, synthetic construct
  source 1..22: mol_type = other RNA
tgggctccgggtggccgcgggc

SEQ ID NO: 300 - RNA, 22 nt, synthetic construct
  source 1..22: mol_type = other RNA
tggtgggctccgggtggccgcg

SEQ ID NO: 301 - RNA, 20 nt, synthetic construct
  source 1..20: mol_type = other RNA
aactggtggaggaggcctgg

SEQ ID NO: 302 - RNA, 20 nt, synthetic construct
  source 1..20: mol_type = other RNA
acctcgcggcccacggccgg

SEQ ID NO: 303 - RNA, 20 nt, synthetic construct
  source 1..20: mol_type = other RNA
acggccggcagcagccaggc

SEQ ID NO: 304 - RNA, 20 nt, synthetic construct
  source 1..20: mol_type = other RNA
actggtggaggaggcctggc

SEQ ID NO: 305 - RNA, 20 nt, synthetic construct
  source 1..20: mol_type = other RNA
aggaggcctggctgctgccg

SEQ ID NO: 306 - RNA, 20 nt, synthetic construct
  source 1..20: mol_type = other RNA
aggcctggctgctgccggcc

SEQ ID NO: 307 - RNA, 20 nt, synthetic construct
  source 1..20: mol_type = other RNA
cacggccggcagcagccagg

SEQ ID NO: 308 - RNA, 20 nt, synthetic construct
  source 1..20: mol_type = other RNA
ccacggccggcagcagccag

SEQ ID NO: 309 - RNA, 20 nt, synthetic construct
  source 1..20: mol_type = other RNA
cccacggccggcagcagcca

SEQ ID NO: 310 - RNA, 20 nt, synthetic construct
  source 1..20: mol_type = other RNA
ccctgggctacctcgcggcc

SEQ ID NO: 311 - RNA, 20 nt, synthetic construct
  source 1..20: mol_type = other RNA
ccggcagcagccaggcctcc

SEQ ID NO: 312 - RNA, 20 nt, synthetic construct
  source 1..20: mol_type = other RNA
ccggccgtgggccgcgaggt

SEQ ID NO: 313 - RNA, 20 nt, synthetic construct
  source 1..20: mol_type = other RNA
cctcgcggcccacggccggc

SEQ ID NO: 314 - RNA, 20 nt, synthetic construct
  source 1..20: mol_type = other RNA
cctggctgctgccggccgtg

SEQ ID NO: 315 - RNA, 20 nt, synthetic construct
  source 1..20: mol_type = other RNA
cctgggctacctcgcggccc

SEQ ID NO: 316 - RNA, 20 nt, synthetic construct
  source 1..20: mol_type = other RNA
cgcggcccacggccggcagc

SEQ ID NO: 317 - RNA, 20 nt, synthetic construct
  source 1..20: mol_type = other RNA
cggcagcagccaggcctcct

SEQ ID NO: 318 - RNA, 20 nt, synthetic construct
  source 1..20: mol_type = other RNA
cggcccacggccggcagcag

SEQ ID NO: 319 - RNA, 20 nt, synthetic construct
  source 1..20: mol_type = other RNA
cggccggcagcagccaggcc

SEQ ID NO: 320 - RNA, 20 nt, synthetic construct
  source 1..20: mol_type = other RNA
cggccgtgggccgcgaggta

SEQ ID NO: 321 - RNA, 20 nt, synthetic construct
  source 1..20: mol_type = other RNA
ctacctcgcggcccacggcc

SEQ ID NO: 322 - RNA, 20 nt, synthetic construct
  source 1..20: mol_type = other RNA
ctcgcggcccacggccggca

SEQ ID NO: 323 - RNA, 20 nt, synthetic construct
  source 1..20: mol_type = other RNA
ctgccggccgtgggccgcga

SEQ ID NO: 324 - RNA, 20 nt, synthetic construct
  source 1..20: mol_type = other RNA
ctgctgccggccgtgggccg

SEQ ID NO: 325 - RNA, 20 nt, synthetic construct
  source 1..20: mol_type = other RNA
ctggctgctgccggccgtgg

SEQ ID NO: 326 - RNA, 20 nt, synthetic construct
  source 1..20: mol_type = other RNA
ctgggctacctcgcggccca

SEQ ID NO: 327 - RNA, 20 nt, synthetic construct
  source 1..20: mol_type = other RNA
ctggtggaggaggcctggct

SEQ ID NO: 328 - RNA, 20 nt, synthetic construct
  source 1..20: mol_type = other RNA
gaggaggcctggctgctgcc

SEQ ID NO: 329 - RNA, 20 nt, synthetic construct
  source 1..20: mol_type = other RNA
gaggcctggctgctgccggc

SEQ ID NO: 330 - RNA, 20 nt, synthetic construct
  source 1..20: mol_type = other RNA
gcccacggccggcagcagcc

SEQ ID NO: 331 - RNA, 20 nt, synthetic construct
  source 1..20: mol_type = other RNA
gccggcagcagccaggcctc

SEQ ID NO: 332 - RNA, 20 nt, synthetic construct
  source 1..20: mol_type = other RNA
gccggccgtgggccgcgagg

SEQ ID NO: 333 - RNA, 20 nt, synthetic construct
  source 1..20: mol_type = other RNA
gcctggctgctgccggccgt

SEQ ID NO: 334 - RNA, 20 nt, synthetic construct
  source 1..20: mol_type = other RNA
gcggcccacggccggcagca

SEQ ID NO: 335 - RNA, 20 nt, synthetic construct
  source 1..20: mol_type = other RNA
gctacctcgcggcccacggc

SEQ ID NO: 336 - RNA, 20 nt, synthetic construct
  source 1..20: mol_type = other RNA
gctgccggccgtgggccgcg

SEQ ID NO: 337 - RNA, 20 nt, synthetic construct
  source 1..20: mol_type = other RNA
gctgctgccggccgtgggcc

SEQ ID NO: 338 - RNA, 20 nt, synthetic construct
  source 1..20: mol_type = other RNA
ggaggaggcctggctgctgc

SEQ ID NO: 339 - RNA, 20 nt, synthetic construct
  source 1..20: mol_type = other RNA
ggaggcctggctgctgccgg

SEQ ID NO: 340 - RNA, 20 nt, synthetic construct
  source 1..20: mol_type = other RNA
ggcagcagccaggcctcctc

SEQ ID NO: 341 - RNA, 20 nt, synthetic construct
  source 1..20: mol_type = other RNA
ggcccacggccggcagcagc

SEQ ID NO: 342 - RNA, 20 nt, synthetic construct
  source 1..20: mol_type = other RNA
ggccggcagcagccaggcct

SEQ ID NO: 343 - RNA, 20 nt, synthetic construct
  source 1..20: mol_type = other RNA
ggcctggctgctgccggccg

SEQ ID NO: 344 - RNA, 20 nt, synthetic construct
  source 1..20: mol_type = other RNA
ggctacctcgcggcccacgg

SEQ ID NO: 345 - RNA, 20 nt, synthetic construct
  source 1..20: mol_type = other RNA
ggctgctgccggccgtgggc

SEQ ID NO: 346 - RNA, 20 nt, synthetic construct
  source 1..20: mol_type = other RNA
gggctacctcgcggcccacg

SEQ ID NO: 347 - RNA, 20 nt, synthetic construct
  source 1..20: mol_type = other RNA
ggtggaggaggcctggctgc

SEQ ID NO: 348 - RNA, 20 nt, synthetic construct
  source 1..20: mol_type = other RNA
gtggaggaggcctggctgct

SEQ ID NO: 349 - RNA, 20 nt, synthetic construct
  source 1..20: mol_type = other RNA
tacctcgcggcccacggccg

SEQ ID NO: 350 - RNA, 20 nt, synthetic construct
  source 1..20: mol_type = other RNA
tcgcggcccacggccggcag

SEQ ID NO: 351 - RNA, 20 nt, synthetic construct
  source 1..20: mol_type = other RNA
tgccggccgtgggccgcgag

SEQ ID NO: 352 - RNA, 20 nt, synthetic construct
  source 1..20: mol_type = other RNA
tgctgccggccgtgggccgc

SEQ ID NO: 353 - RNA, 20 nt, synthetic construct
  source 1..20: mol_type = other RNA
tggaggaggcctggctgctg

SEQ ID NO: 354 - RNA, 20 nt, synthetic construct
  source 1..20: mol_type = other RNA
tggctgctgccggccgtggg

SEQ ID NO: 355 - RNA, 20 nt, synthetic construct
  source 1..20: mol_type = other RNA
tgggctacctcgcggcccac

SEQ ID NO: 356 - RNA, 20 nt, synthetic construct
  source 1..20: mol_type = other RNA
tggtggaggaggcctggctg

SEQ ID NO: 357 - RNA, 21 nt, synthetic construct
  source 1..21: mol_type = other RNA
aactggtggaggaggcctggc

SEQ ID NO: 358 - RNA, 21 nt, synthetic construct
  source 1..21: mol_type = other RNA
accctgggctacctcgcggcc

SEQ ID NO: 359 - RNA, 21 nt, synthetic construct
  source 1..21: mol_type = other RNA
acctcgcggcccacggccggc

SEQ ID NO: 360 - RNA, 21 nt, synthetic construct
  source 1..21: mol_type = other RNA
acggccggcagcagccaggcc

SEQ ID NO: 361 - RNA, 21 nt, synthetic construct
  source 1..21: mol_type = other RNA
actggtggaggaggcctggct

SEQ ID NO: 362 - RNA, 21 nt, synthetic construct
  source 1..21: mol_type = other RNA
aggaggcctggctgctgccgg

SEQ ID NO: 363 - RNA, 21 nt, synthetic construct
  source 1..21: mol_type = other RNA
aggcctggctgctgccggccg

SEQ ID NO: 364 - RNA, 21 nt, synthetic construct
  source 1..21: mol_type = other RNA
caactggtggaggaggcctgg

SEQ ID NO: 365 - RNA, 21 nt, synthetic construct
  source 1..21: mol_type = other RNA
cacggccggcagcagccaggc

SEQ ID NO: 366 - RNA, 21 nt, synthetic construct
  source 1..21: mol_type = other RNA
ccacggccggcagcagccagg

SEQ ID NO: 367 - RNA, 21 nt, synthetic construct
  source 1..21: mol_type = other RNA
cccacggccggcagcagccag

SEQ ID NO: 368 - RNA, 21 nt, synthetic construct
  source 1..21: mol_type = other RNA
ccctgggctacctcgcggccc

SEQ ID NO: 369 - RNA, 21 nt, synthetic construct
  source 1..21: mol_type = other RNA
ccggcagcagccaggcctcct

SEQ ID NO: 370 - RNA, 21 nt, synthetic construct
  source 1..21: mol_type = other RNA
ccggccgtgggccgcgaggta

SEQ ID NO: 371 - RNA, 21 nt, synthetic construct
  source 1..21: mol_type = other RNA
cctcgcggcccacggccggca

SEQ ID NO: 372 - RNA, 21 nt, synthetic construct
  source 1..21: mol_type = other RNA
cctggctgctgccggccgtgg

SEQ ID NO: 373 - RNA, 21 nt, synthetic construct
  source 1..21: mol_type = other RNA
cctgggctacctcgcggccca

SEQ ID NO: 374 - RNA, 21 nt, synthetic construct
  source 1..21: mol_type = other RNA
cgcggcccacggccggcagca

SEQ ID NO: 375 - RNA, 21 nt, synthetic construct
  source 1..21: mol_type = other RNA
cggcagcagccaggcctcctc

SEQ ID NO: 376 - RNA, 21 nt, synthetic construct
  source 1..21: mol_type = other RNA
cggcccacggccggcagcagc

SEQ ID NO: 377 - RNA, 21 nt, synthetic construct
  source 1..21: mol_type = other RNA
cggccggcagcagccaggcct

SEQ ID NO: 378 - RNA, 21 nt, synthetic construct
  source 1..21: mol_type = other RNA
cggccgtgggccgcgaggtag

SEQ ID NO: 379 - RNA, 21 nt, synthetic construct
  source 1..21: mol_type = other RNA
ctacctcgcggcccacggccg

SEQ ID NO: 380 - RNA, 21 nt, synthetic construct
  source 1..21: mol_type = other RNA
ctcgcggcccacggccggcag

SEQ ID NO: 381 - RNA, 21 nt, synthetic construct
  source 1..21: mol_type = other RNA
ctgccggccgtgggccgcgag

SEQ ID NO: 382 - RNA, 21 nt, synthetic construct
  source 1..21: mol_type = other RNA
ctgctgccggccgtgggccgc

SEQ ID NO: 383 - RNA, 21 nt, synthetic construct
  source 1..21: mol_type = other RNA
ctggctgctgccggccgtggg

SEQ ID NO: 384 - RNA, 21 nt, synthetic construct
  source 1..21: mol_type = other RNA
ctgggctacctcgcggcccac

SEQ ID NO: 385 - RNA, 21 nt, synthetic construct
  source 1..21: mol_type = other RNA
ctggtggaggaggcctggctg

SEQ ID NO: 386 - RNA, 21 nt, synthetic construct
  source 1..21: mol_type = other RNA
gaggaggcctggctgctgccg

SEQ ID NO: 387 - RNA, 21 nt, synthetic construct
  source 1..21: mol_type = other RNA
gaggcctggctgctgccggcc

SEQ ID NO: 388 - RNA, 21 nt, synthetic construct
  source 1..21: mol_type = other RNA
gcccacggccggcagcagcca

SEQ ID NO: 389 - RNA, 21 nt, synthetic construct
  source 1..21: mol_type = other RNA
gccggcagcagccaggcctcc

SEQ ID NO: 390 - RNA, 21 nt, synthetic construct
  source 1..21: mol_type = other RNA
gccggccgtgggccgcgaggt

SEQ ID NO: 391 - RNA, 21 nt, synthetic construct
  source 1..21: mol_type = other RNA
gcctggctgctgccggccgtg

SEQ ID NO: 392 - RNA, 21 nt, synthetic construct
  source 1..21: mol_type = other RNA
gcggcccacggccggcagcag

SEQ ID NO: 393 - RNA, 21 nt, synthetic construct
  source 1..21: mol_type = other RNA
gctacctcgcggcccacggcc

SEQ ID NO: 394 - RNA, 21 nt, synthetic construct
  source 1..21: mol_type = other RNA
gctgccggccgtgggccgcga

SEQ ID NO: 395 - RNA, 21 nt, synthetic construct
  source 1..21: mol_type = other RNA
gctgctgccggccgtgggccg

SEQ ID NO: 396 - RNA, 21 nt, synthetic construct
  source 1..21: mol_type = other RNA
ggaggaggcctggctgctgcc

SEQ ID NO: 397 - RNA, 21 nt, synthetic construct
  source 1..21: mol_type = other RNA
ggaggcctggctgctgccggc

SEQ ID NO: 398 - RNA, 21 nt, synthetic construct
  source 1..21: mol_type = other RNA
ggcagcagccaggcctcctcc

SEQ ID NO: 399 - RNA, 21 nt, synthetic construct
  source 1..21: mol_type = other RNA
ggcccacggccggcagcagcc

SEQ ID NO: 400 - RNA, 21 nt, synthetic construct
  source 1..21: mol_type = other RNA
ggccggcagcagccaggcctc

SEQ ID NO: 401 - RNA, 21 nt, synthetic construct
  source 1..21: mol_type = other RNA
ggcctggctgctgccggccgt

SEQ ID NO: 402 - RNA, 21 nt, synthetic construct
  source 1..21: mol_type = other RNA
ggctacctcgcggcccacggc

SEQ ID NO: 403 - RNA, 21 nt, synthetic construct
  source 1..21: mol_type = other RNA
ggctgctgccggccgtgggcc

SEQ ID NO: 404 - RNA, 21 nt, synthetic construct
  source 1..21: mol_type = other RNA
gggctacctcgcggcccacgg

SEQ ID NO: 405 - RNA, 21 nt, synthetic construct
  source 1..21: mol_type = other RNA
ggtggaggaggcctggctgct

SEQ ID NO: 406 - RNA, 21 nt, synthetic construct
  source 1..21: mol_type = other RNA
gtggaggaggcctggctgctg

SEQ ID NO: 407 - RNA, 21 nt, synthetic construct
  source 1..21: mol_type = other RNA
tacctcgcggcccacggccgg

SEQ ID NO: 408 - RNA, 21 nt, synthetic construct
  source 1..21: mol_type = other RNA
tcgcggcccacggccggcagc

SEQ ID NO: 409 - RNA, 21 nt, synthetic construct
  source 1..21: mol_type = other RNA
tgccggccgtgggccgcgagg

SEQ ID NO: 410 - RNA, 21 nt, synthetic construct
  source 1..21: mol_type = other RNA
tgctgccggccgtgggccgcg

SEQ ID NO: 411 - RNA, 21 nt, synthetic construct
  source 1..21: mol_type = other RNA
tggaggaggcctggctgctgc

SEQ ID NO: 412 - RNA, 21 nt, synthetic construct
  source 1..21: mol_type = other RNA
tggctgctgccggccgtgggc

SEQ ID NO: 413 - RNA, 21 nt, synthetic construct
  source 1..21: mol_type = other RNA
tgggctacctcgcggcccacg

SEQ ID NO: 414 - RNA, 21 nt, synthetic construct
  source 1..21: mol_type = other RNA
tggtggaggaggcctggctgc

SEQ ID NO: 415 - RNA, 22 nt, synthetic construct
  source 1..22: mol_type = other RNA
aactggtggaggaggcctggct

SEQ ID NO: 416 - RNA, 22 nt, synthetic construct
  source 1..22: mol_type = other RNA
accctgggctacctcgcggccc

SEQ ID NO: 417 - RNA, 22 nt, synthetic construct
  source 1..22: mol_type = other RNA
acctcgcggcccacggccggca

SEQ ID NO: 418 - RNA, 22 nt, synthetic construct
  source 1..22: mol_type = other RNA
acggccggcagcagccaggcct

SEQ ID NO: 419 - RNA, 22 nt, synthetic construct
  source 1..22: mol_type = other RNA
actggtggaggaggcctggctg

SEQ ID NO: 420 - RNA, 22 nt, synthetic construct
  source 1..22: mol_type = other RNA
aggaggcctggctgctgccggc

SEQ ID NO: 421 - RNA, 22 nt, synthetic construct
  source 1..22: mol_type = other RNA
aggcctggctgctgccggccgt

SEQ ID NO: 422 - RNA, 22 nt, synthetic construct
  source 1..22: mol_type = other RNA
caactggtggaggaggcctggc

SEQ ID NO: 423 - RNA, 22 nt, synthetic construct
  source 1..22: mol_type = other RNA
cacggccggcagcagccaggcc

SEQ ID NO: 424 - RNA, 22 nt, synthetic construct
  source 1..22: mol_type = other RNA
ccaactggtggaggaggcctgg

SEQ ID NO: 425 - RNA, 22 nt, synthetic construct
  source 1..22: mol_type = other RNA
ccacggccggcagcagccaggc

SEQ ID NO: 426 - RNA, 22 nt, synthetic construct
  source 1..22: mol_type = other RNA
cccacggccggcagcagccagg

SEQ ID NO: 427 - RNA, 22 nt, synthetic construct
  source 1..22: mol_type = other RNA
ccctgggctacctcgcggccca

SEQ ID NO: 428 - RNA, 22 nt, synthetic construct
  source 1..22: mol_type = other RNA
ccggcagcagccaggcctcctc

SEQ ID NO: 429 - RNA, 22 nt, synthetic construct
  source 1..22: mol_type = other RNA
ccggccgtgggccgcgaggtag

SEQ ID NO: 430 - RNA, 22 nt, synthetic construct
  source 1..22: mol_type = other RNA
cctcgcggcccacggccggcag

SEQ ID NO: 431 - RNA, 22 nt, synthetic construct
  source 1..22: mol_type = other RNA
cctggctgctgccggccgtggg

SEQ ID NO: 432 - RNA, 22 nt, synthetic construct
  source 1..22: mol_type = other RNA
cctgggctacctcgcggcccac

SEQ ID NO: 433 - RNA, 22 nt, synthetic construct
  source 1..22: mol_type = other RNA
cgcggcccacggccggcagcag

SEQ ID NO: 434 - RNA, 22 nt, synthetic construct
  source 1..22: mol_type = other RNA
cggcagcagccaggcctcctcc

SEQ ID NO: 435 - RNA, 22 nt, synthetic construct
  source 1..22: mol_type = other RNA
cggcccacggccggcagcagcc

SEQ ID NO: 436 - RNA, 22 nt, synthetic construct
  source 1..22: mol_type = other RNA
cggccggcagcagccaggcctc

SEQ ID NO: 437 - RNA, 22 nt, synthetic construct
  source 1..22: mol_type = other RNA
cggccgtgggccgcgaggtagc

SEQ ID NO: 438 - RNA, 22 nt, synthetic construct
  source 1..22: mol_type = other RNA
ctacctcgcggcccacggccgg

SEQ ID NO: 439 - RNA, 22 nt, synthetic construct
  source 1..22: mol_type = other RNA
ctcgcggcccacggccggcagc

SEQ ID NO: 440 - RNA, 22 nt, synthetic construct
  source 1..22: mol_type = other RNA
ctgccggccgtgggccgcgagg

SEQ ID NO: 441 - RNA, 22 nt, synthetic construct
  source 1..22: mol_type = other RNA
ctgctgccggccgtgggccgcg

SEQ ID NO: 442 - RNA, 22 nt, synthetic construct
  source 1..22: mol_type = other RNA
ctggctgctgccggccgtgggc

SEQ ID NO: 443 - RNA, 22 nt, synthetic construct
  source 1..22: mol_type = other RNA
ctgggctacctcgcggcccacg

SEQ ID NO: 444 - RNA, 22 nt, synthetic construct
  source 1..22: mol_type = other RNA
ctggtggaggaggcctggctgc

SEQ ID NO: 445 - RNA, 22 nt, synthetic construct
  source 1..22: mol_type = other RNA
gaccctgggctacctcgcggcc

SEQ ID NO: 446 - RNA, 22 nt, synthetic construct
  source 1..22: mol_type = other RNA
gaggaggcctggctgctgccgg

SEQ ID NO: 447 - RNA, 22 nt, synthetic construct
  source 1..22: mol_type = other RNA
gaggcctggctgctgccggccg

SEQ ID NO: 448 - RNA, 22 nt, synthetic construct
  source 1..22: mol_type = other RNA
gcccacggccggcagcagccag

SEQ ID NO: 449 - RNA, 22 nt, synthetic construct
  source 1..22: mol_type = other RNA
gccggcagcagccaggcctcct

SEQ ID NO: 450 - RNA, 22 nt, synthetic construct
  source 1..22: mol_type = other RNA
gccggccgtgggccgcgaggta

SEQ ID NO: 451 - RNA, 22 nt, synthetic construct
  source 1..22: mol_type = other RNA
gcctggctgctgccggccgtgg

SEQ ID NO: 452 - RNA, 22 nt, synthetic construct
  source 1..22: mol_type = other RNA
gcggcccacggccggcagcagc

SEQ ID NO: 453 - RNA, 22 nt, synthetic construct
  source 1..22: mol_type = other RNA
gctacctcgcggcccacggccg

SEQ ID NO: 454 - RNA, 22 nt, synthetic construct
  source 1..22: mol_type = other RNA
gctgccggccgtgggccgcgag

SEQ ID NO: 455 - RNA, 22 nt, synthetic construct
  source 1..22: mol_type = other RNA
gctgctgccggccgtgggccgc

SEQ ID NO: 456 - RNA, 22 nt, synthetic construct
  source 1..22: mol_type = other RNA
ggaggaggcctggctgctgccg

SEQ ID NO: 457 - RNA, 22 nt, synthetic construct
  source 1..22: mol_type = other RNA
ggaggcctggctgctgccggcc

SEQ ID NO: 458 - RNA, 22 nt, synthetic construct
  source 1..22: mol_type = other RNA
ggcagcagccaggcctcctcca

SEQ ID NO: 459 - RNA, 22 nt, synthetic construct
  source 1..22: mol_type = other RNA
ggcccacggccggcagcagcca

SEQ ID NO: 460 - RNA, 22 nt, synthetic construct
  source 1..22: mol_type = other RNA
ggccggcagcagccaggcctcc

SEQ ID NO: 461 - RNA, 22 nt, synthetic construct
  source 1..22: mol_type = other RNA
ggcctggctgctgccggccgtg

SEQ ID NO: 462 - RNA, 22 nt, synthetic construct
  source 1..22: mol_type = other RNA
ggctacctcgcggcccacggcc

SEQ ID NO: 463 - RNA, 22 nt, synthetic construct
  source 1..22: mol_type = other RNA
ggctgctgccggccgtgggccg

SEQ ID NO: 464 - RNA, 22 nt, synthetic construct
  source 1..22: mol_type = other RNA
gggctacctcgcggcccacggc

SEQ ID NO: 465 - RNA, 22 nt, synthetic construct
  source 1..22: mol_type = other RNA
ggtggaggaggcctggctgctg

SEQ ID NO: 466 - RNA, 22 nt, synthetic construct
  source 1..22: mol_type = other RNA
gtggaggaggcctggctgctgc

SEQ ID NO: 467 - RNA, 22 nt, synthetic construct
  source 1..22: mol_type = other RNA
tacctcgcggcccacggccggc

SEQ ID NO: 468 - RNA, 22 nt, synthetic construct
  source 1..22: mol_type = other RNA
tcgcggcccacggccggcagca

SEQ ID NO: 469 - RNA, 22 nt, synthetic construct
  source 1..22: mol_type = other RNA
tgccggccgtgggccgcgaggt

SEQ ID NO: 470 - RNA, 22 nt, synthetic construct
  source 1..22: mol_type = other RNA
tgctgccggccgtgggccgcga

SEQ ID NO: 471 - RNA, 22 nt, synthetic construct
  source 1..22: mol_type = other RNA
tggaggaggcctggctgctgcc

SEQ ID NO: 472 - RNA, 22 nt, synthetic construct
  source 1..22: mol_type = other RNA
tggctgctgccggccgtgggcc

SEQ ID NO: 473 - RNA, 22 nt, synthetic construct
  source 1..22: mol_type = other RNA
tgggctacctcgcggcccacgg

SEQ ID NO: 474 - RNA, 22 nt, synthetic construct
  source 1..22: mol_type = other RNA
tggtggaggaggcctggctgct

SEQ ID NO: 475 - RNA, 20 nt, synthetic construct
  source 1..20: mol_type = other RNA
acctcgcggcccacggccag

SEQ ID NO: 476 - RNA, 20 nt, synthetic construct
  source 1..20: mol_type = other RNA
acggccaggcagcagccagg

SEQ ID NO: 477 - RNA, 20 nt, synthetic construct
  source 1..20: mol_type = other RNA
aggaggcctggctgctgcct

SEQ ID NO: 478 - RNA, 20 nt, synthetic construct
  source 1..20: mol_type = other RNA
aggcagcagccaggcctcct

SEQ ID NO: 479 - RNA, 20 nt, synthetic construct
  source 1..20: mol_type = other RNA
aggcctggctgctgcctggc

SEQ ID NO: 480 - RNA, 20 nt, synthetic construct
  source 1..20: mol_type = other RNA
cacggccaggcagcagccag

SEQ ID NO: 481 - RNA, 20 nt, synthetic construct
  source 1..20: mol_type = other RNA
caggcagcagccaggcctcc

SEQ ID NO: 482 - RNA, 20 nt, synthetic construct
  source 1..20: mol_type = other RNA
ccacggccaggcagcagcca

SEQ ID NO: 483 - RNA, 20 nt, synthetic construct
  source 1..20: mol_type = other RNA
ccaggcagcagccaggcctc

SEQ ID NO: 484 - RNA, 20 nt, synthetic construct
  source 1..20: mol_type = other RNA
cccacggccaggcagcagcc

SEQ ID NO: 485 - RNA, 20 nt, synthetic construct
  source 1..20: mol_type = other RNA
cctcgcggcccacggccagg

SEQ ID NO: 486 - RNA, 20 nt, synthetic construct
  source 1..20: mol_type = other RNA
cctggccgtgggccgcgagg

SEQ ID NO: 487 - RNA, 20 nt, synthetic construct
  source 1..20: mol_type = other RNA
cctggctgctgcctggccgt

SEQ ID NO: 488 - RNA, 20 nt, synthetic construct
  source 1..20: mol_type = other RNA
cgcggcccacggccaggcag

SEQ ID NO: 489 - RNA, 20 nt, synthetic construct
  source 1..20: mol_type = other RNA
cggccaggcagcagccaggc

SEQ ID NO: 490 - RNA, 20 nt, synthetic construct
  source 1..20: mol_type = other RNA
cggcccacggccaggcagca

SEQ ID NO: 491 - RNA, 20 nt, synthetic construct
  source 1..20: mol_type = other RNA
ctcgcggcccacggccaggc

SEQ ID NO: 492 - RNA, 20 nt, synthetic construct
  source 1..20: mol_type = other RNA
ctgcctggccgtgggccgcg

SEQ ID NO: 493 - RNA, 20 nt, synthetic construct
  source 1..20: mol_type = other RNA
ctgctgcctggccgtgggcc

SEQ ID NO: 494 - RNA, 20 nt, synthetic construct
  source 1..20: mol_type = other RNA
ctggccgtgggccgcgaggt

SEQ ID NO: 495 - RNA, 20 nt, synthetic construct
  source 1..20: mol_type = other RNA
ctggctgctgcctggccgtg

SEQ ID NO: 496 - RNA, 20 nt, synthetic construct
  source 1..20: mol_type = other RNA
gaggcctggctgctgcctgg

SEQ ID NO: 497 - RNA, 20 nt, synthetic construct
  source 1..20: mol_type = other RNA
gccaggcagcagccaggcct

SEQ ID NO: 498 - RNA, 20 nt, synthetic construct
  source 1..20: mol_type = other RNA
gcccacggccaggcagcagc

SEQ ID NO: 499 - RNA, 20 nt, synthetic construct
  source 1..20: mol_type = other RNA
gcctggccgtgggccgcgag

SEQ ID NO: 500 - RNA, 20 nt, synthetic construct
  source 1..20: mol_type = other RNA
gcctggctgctgcctggccg

SEQ ID NO: 501 - RNA, 20 nt, synthetic construct
  source 1..20: mol_type = other RNA
gcggcccacggccaggcagc

SEQ ID NO: 502 - RNA, 20 nt, synthetic construct
  source 1..20: mol_type = other RNA
gctgcctggccgtgggccgc

SEQ ID NO: 503 - RNA, 20 nt, synthetic construct
  source 1..20: mol_type = other RNA
gctgctgcctggccgtgggc

SEQ ID NO: 504 - RNA, 20 nt, synthetic construct
  source 1..20: mol_type = other RNA
ggaggcctggctgctgcctg

SEQ ID NO: 505 - RNA, 20 nt, synthetic construct
  source 1..20: mol_type = other RNA
ggccaggcagcagccaggcc

SEQ ID NO: 506 - RNA, 20 nt, synthetic construct
  source 1..20: mol_type = other RNA
ggcccacggccaggcagcag

SEQ ID NO: 507 - RNA, 20 nt, synthetic construct
  source 1..20: mol_type = other RNA
ggcctggctgctgcctggcc

SEQ ID NO: 508 - RNA, 20 nt, synthetic construct
  source 1..20: mol_type = other RNA
ggctgctgcctggccgtggg

SEQ ID NO: 509 - RNA, 20 nt, synthetic construct
  source 1..20: mol_type = other RNA
tacctcgcggcccacggcca

SEQ ID NO: 510 - RNA, 20 nt, synthetic construct
  source 1..20: mol_type = other RNA
tcgcggcccacggccaggca

SEQ ID NO: 511 - RNA, 20 nt, synthetic construct
  source 1..20: mol_type = other RNA
tgcctggccgtgggccgcga

SEQ ID NO: 512 - RNA, 20 nt, synthetic construct
  source 1..20: mol_type = other RNA
tgctgcctggccgtgggccg

SEQ ID NO: 513 - RNA, 20 nt, synthetic construct
  source 1..20: mol_type = other RNA
tggctgctgcctggccgtgg

SEQ ID NO: 514 - RNA, 21 nt, synthetic construct
  source 1..21: mol_type = other RNA
acctcgcggcccacggccagg

SEQ ID NO: 515 - RNA, 21 nt, synthetic construct
  source 1..21: mol_type = other RNA
acggccaggcagcagccaggc

SEQ ID NO: 516 - RNA, 21 nt, synthetic construct
  source 1..21: mol_type = other RNA
aggaggcctggctgctgcctg

SEQ ID NO: 517 - RNA, 21 nt, synthetic construct
  source 1..21: mol_type = other RNA
aggcagcagccaggcctcctc

SEQ ID NO: 518 - RNA, 21 nt, synthetic construct
  source 1..21: mol_type = other RNA
aggcctggctgctgcctggcc

SEQ ID NO: 519 - RNA, 21 nt, synthetic construct
  source 1..21: mol_type = other RNA
cacggccaggcagcagccagg

SEQ ID NO: 520 - RNA, 21 nt, synthetic construct
  source 1..21: mol_type = other RNA
caggcagcagccaggcctcct

SEQ ID NO: 521 - RNA, 21 nt, synthetic construct
  source 1..21: mol_type = other RNA
ccacggccaggcagcagccag

SEQ ID NO: 522 - RNA, 21 nt, synthetic construct
  source 1..21: mol_type = other RNA
ccaggcagcagccaggcctcc

SEQ ID NO: 523 - RNA, 21 nt, synthetic construct
  source 1..21: mol_type = other RNA
cccacggccaggcagcagcca

SEQ ID NO: 524 - RNA, 21 nt, synthetic construct
  source 1..21: mol_type = other RNA
cctcgcggcccacggccaggc

SEQ ID NO: 525 - RNA, 21 nt, synthetic construct
  source 1..21: mol_type = other RNA
cctggccgtgggccgcgaggt

SEQ ID NO: 526 - RNA, 21 nt, synthetic construct
  source 1..21: mol_type = other RNA
cctggctgctgcctggccgtg

SEQ ID NO: 527 - RNA, 21 nt, synthetic construct
  source 1..21: mol_type = other RNA
cgcggcccacggccaggcagc

SEQ ID NO: 528 - RNA, 21 nt, synthetic construct
  source 1..21: mol_type = other RNA
cggccaggcagcagccaggcc

SEQ ID NO: 529 - RNA, 21 nt, synthetic construct
  source 1..21: mol_type = other RNA
cggcccacggccaggcagcag

SEQ ID NO: 530 - RNA, 21 nt, synthetic construct
  source 1..21: mol_type = other RNA
ctacctcgcggcccacggcca

SEQ ID NO: 531 - RNA, 21 nt, synthetic construct
  source 1..21: mol_type = other RNA
ctcgcggcccacggccaggca

SEQ ID NO: 532 - RNA, 21 nt, synthetic construct
  source 1..21: mol_type = other RNA
ctgcctggccgtgggccgcga

SEQ ID NO: 533 - RNA, 21 nt, synthetic construct
  source 1..21: mol_type = other RNA
ctgctgcctggccgtgggccg

SEQ ID NO: 534 - RNA, 21 nt, synthetic construct
  source 1..21: mol_type = other RNA
ctggccgtgggccgcgaggta

SEQ ID NO: 535 - RNA, 21 nt, synthetic construct
  source 1..21: mol_type = other RNA
ctggctgctgcctggccgtgg

SEQ ID NO: 536 - RNA, 21 nt, synthetic construct
  source 1..21: mol_type = other RNA
gaggaggcctggctgctgcct

SEQ ID NO: 537 - RNA, 21 nt, synthetic construct
  source 1..21: mol_type = other RNA
gaggcctggctgctgcctggc

SEQ ID NO: 538 - RNA, 21 nt, synthetic construct
  source 1..21: mol_type = other RNA
gccaggcagcagccaggcctc

SEQ ID NO: 539 - RNA, 21 nt, synthetic construct
  source 1..21: mol_type = other RNA
gcccacggccaggcagcagcc

SEQ ID NO: 540 - RNA, 21 nt, synthetic construct
  source 1..21: mol_type = other RNA
gcctggccgtgggccgcgagg

SEQ ID NO: 541 - RNA, 21 nt, synthetic construct
  source 1..21: mol_type = other RNA
gcctggctgctgcctggccgt

SEQ ID NO: 542 - RNA, 21 nt, synthetic construct
  source 1..21: mol_type = other RNA
gcggcccacggccaggcagca

SEQ ID NO: 543 - RNA, 21 nt, synthetic construct
  source 1..21: mol_type = other RNA
gctgcctggccgtgggccgcg

SEQ ID NO: 544 - RNA, 21 nt, synthetic construct
  source 1..21: mol_type = other RNA
gctgctgcctggccgtgggcc

SEQ ID NO: 545 - RNA, 21 nt, synthetic construct
  source 1..21: mol_type = other RNA
ggaggcctggctgctgcctgg

SEQ ID NO: 546 - RNA, 21 nt, synthetic construct
  source 1..21: mol_type = other RNA
ggccaggcagcagccaggcct

SEQ ID NO: 547 - RNA, 21 nt, synthetic construct
  source 1..21: mol_type = other RNA
ggcccacggccaggcagcagc

SEQ ID NO: 548 - RNA, 21 nt, synthetic construct
  source 1..21: mol_type = other RNA
ggcctggctgctgcctggccg

SEQ ID NO: 549 - RNA, 21 nt, synthetic construct
  source 1..21: mol_type = other RNA
ggctgctgcctggccgtgggc

SEQ ID NO: 550 - RNA, 21 nt, synthetic construct
  source 1..21: mol_type = other RNA
tacctcgcggcccacggccag

SEQ ID NO: 551 - RNA, 21 nt, synthetic construct
  source 1..21: mol_type = other RNA
tcgcggcccacggccaggcag

SEQ ID NO: 552 - RNA, 21 nt, synthetic construct
  source 1..21: mol_type = other RNA
tgcctggccgtgggccgcgag

SEQ ID NO: 553 - RNA, 21 nt, synthetic construct
  source 1..21: mol_type = other RNA
tgctgcctggccgtgggccgc

SEQ ID NO: 554 - RNA, 21 nt, synthetic construct
  source 1..21: mol_type = other RNA
tggctgctgcctggccgtggg

SEQ ID NO: 555 - RNA, 22 nt, synthetic construct
  source 1..22: mol_type = other RNA
acctcgcggcccacggccaggc

SEQ ID NO: 556 - RNA, 22 nt, synthetic construct
  source 1..22: mol_type = other RNA
acggccaggcagcagccaggcc

SEQ ID NO: 557 - RNA, 22 nt, synthetic construct
  source 1..22: mol_type = other RNA
aggaggcctggctgctgcctgg

SEQ ID NO: 558 - RNA, 22 nt, synthetic construct
  source 1..22: mol_type = other RNA
aggcagcagccaggcctcctcc

SEQ ID NO: 559 - RNA, 22 nt, synthetic construct
  source 1..22: mol_type = other RNA
aggcctggctgctgcctggccg

SEQ ID NO: 560 - RNA, 22 nt, synthetic construct
  source 1..22: mol_type = other RNA
cacggccaggcagcagccaggc

SEQ ID NO: 561 - RNA, 22 nt, synthetic construct
  source 1..22: mol_type = other RNA
caggcagcagccaggcctcctc

SEQ ID NO: 562 - RNA, 22 nt, synthetic construct
  source 1..22: mol_type = other RNA
ccacggccaggcagcagccagg

SEQ ID NO: 563 - RNA, 22 nt, synthetic construct
  source 1..22: mol_type = other RNA
ccaggcagcagccaggcctcct

SEQ ID NO: 564 - RNA, 22 nt, synthetic construct
  source 1..22: mol_type = other RNA
cccacggccaggcagcagccag

SEQ ID NO: 565 - RNA, 22 nt, synthetic construct
  source 1..22: mol_type = other RNA
cctcgcggcccacggccaggca

SEQ ID NO: 566 - RNA, 22 nt, synthetic construct
  source 1..22: mol_type = other RNA
cctggccgtgggccgcgaggta

SEQ ID NO: 567 - RNA, 22 nt, synthetic construct
  source 1..22: mol_type = other RNA
cctggctgctgcctggccgtgg

SEQ ID NO: 568 - RNA, 22 nt, synthetic construct
  source 1..22: mol_type = other RNA
cgcggcccacggccaggcagca

SEQ ID NO: 569 - RNA, 22 nt, synthetic construct
  source 1..22: mol_type = other RNA
cggccaggcagcagccaggcct

SEQ ID NO: 570 - RNA, 22 nt, synthetic construct
  source 1..22: mol_type = other RNA
cggcccacggccaggcagcagc

SEQ ID NO: 571 - RNA, 22 nt, synthetic construct
  source 1..22: mol_type = other RNA
ctacctcgcggcccacggccag

SEQ ID NO: 572 - RNA, 22 nt, synthetic construct
  source 1..22: mol_type = other RNA
ctcgcggcccacggccaggcag

SEQ ID NO: 573 - RNA, 22 nt, synthetic construct
  source 1..22: mol_type = other RNA
ctgcctggccgtgggccgcgag

SEQ ID NO: 574 - RNA, 22 nt, synthetic construct
  source 1..22: mol_type = other RNA
ctgctgcctggccgtgggccgc

SEQ ID NO: 575 - RNA, 22 nt, synthetic construct
  source 1..22: mol_type = other RNA
ctggccgtgggccgcgaggtag

SEQ ID NO: 576 - RNA, 22 nt, synthetic construct
  source 1..22: mol_type = other RNA
ctggctgctgcctggccgtggg

SEQ ID NO: 577 - RNA, 22 nt, synthetic construct
  source 1..22: mol_type = other RNA
gaggaggcctggctgctgcctg

SEQ ID NO: 578 - RNA, 22 nt, synthetic construct
  source 1..22: mol_type = other RNA
gaggcctggctgctgcctggcc

SEQ ID NO: 579 - RNA, 22 nt, synthetic construct
  source 1..22: mol_type = other RNA
gccaggcagcagccaggcctcc

SEQ ID NO: 580 - RNA, 22 nt, synthetic construct
  source 1..22: mol_type = other RNA
gcccacggccaggcagcagcca

SEQ ID NO: 581 - RNA, 22 nt, synthetic construct
  source 1..22: mol_type = other RNA
gcctggccgtgggccgcgaggt

SEQ ID NO: 582 - RNA, 22 nt, synthetic construct
  source 1..22: mol_type = other RNA
gcctggctgctgcctggccgtg

SEQ ID NO: 583 - RNA, 22 nt, synthetic construct
  source 1..22: mol_type = other RNA
gcggcccacggccaggcagcag

SEQ ID NO: 584 - RNA, 22 nt, synthetic construct
  source 1..22: mol_type = other RNA
gctacctcgcggcccacggcca

SEQ ID NO: 585 - RNA, 22 nt, synthetic construct
  source 1..22: mol_type = other RNA
gctgcctggccgtgggccgcga

SEQ ID NO: 586 - RNA, 22 nt, synthetic construct
  source 1..22: mol_type = other RNA
gctgctgcctggccgtgggccg

SEQ ID NO: 587 - RNA, 22 nt, synthetic construct
  source 1..22: mol_type = other RNA
ggaggaggcctggctgctgcct

SEQ ID NO: 588 - RNA, 22 nt, synthetic construct
  source 1..22: mol_type = other RNA
ggaggcctggctgctgcctggc

SEQ ID NO: 589 - RNA, 22 nt, synthetic construct
  source 1..22: mol_type = other RNA
ggccaggcagcagccaggcctc

SEQ ID NO: 590 - RNA, 22 nt, synthetic construct
  source 1..22: mol_type = other RNA
ggcccacggccaggcagcagcc

SEQ ID NO: 591 - RNA, 22 nt, synthetic construct
  source 1..22: mol_type = other RNA
ggcctggctgctgcctggccgt

SEQ ID NO: 592 - RNA, 22 nt, synthetic construct
  source 1..22: mol_type = other RNA
ggctgctgcctggccgtgggcc

SEQ ID NO: 593 - RNA, 22 nt, synthetic construct
  source 1..22: mol_type = other RNA
tacctcgcggcccacggccagg

SEQ ID NO: 594 - RNA, 22 nt, synthetic construct
  source 1..22: mol_type = other RNA
tcgcggcccacggccaggcagc

SEQ ID NO: 595 - RNA, 22 nt, synthetic construct
  source 1..22: mol_type = other RNA
tgcctggccgtgggccgcgagg

SEQ ID NO: 596 - RNA, 22 nt, synthetic construct
  source 1..22: mol_type = other RNA
tgctgcctggccgtgggccgcg

SEQ ID NO: 597 - RNA, 22 nt, synthetic construct
  source 1..22: mol_type = other RNA
tggctgctgcctggccgtgggc

SEQ ID NO: 598 - RNA, 20 nt, synthetic construct
  source 1..20: mol_type = other RNA
aaactggtgtcagagcctgc

SEQ ID NO: 599 - RNA, 20 nt, synthetic construct
  source 1..20: mol_type = other RNA
aacctaaccagtccccagtt

SEQ ID NO: 600 - RNA, 20 nt, synthetic construct
  source 1..20: mol_type = other RNA
aactggggactggttaggtt

SEQ ID NO: 601 - RNA, 20 nt, synthetic construct
  source 1..20: mol_type = other RNA
aactggtgtcagagcctgca

SEQ ID NO: 602 - RNA, 20 nt, synthetic construct
  source 1..20: mol_type = other RNA
aagatcatccgcttcctgca

SEQ ID NO: 603 - RNA, 20 nt, synthetic construct
  source 1..20: mol_type = other RNA
aagcggatgatcttctcaat

SEQ ID NO: 604 - RNA, 20 nt, synthetic construct
  source 1..20: mol_type = other RNA
aataccaggaggccaccatt

SEQ ID NO: 605 - RNA, 20 nt, synthetic construct
  source 1..20: mol_type = other RNA
aatggtggcctcctggtatt

SEQ ID NO: 606 - RNA, 20 nt, synthetic construct
  source 1..20: mol_type = other RNA
acaccagtttggagggtgct

SEQ ID NO: 607 - RNA, 20 nt, synthetic construct
  source 1..20: mol_type = other RNA
accaggaggccaccattgag

SEQ ID NO: 608 - RNA, 20 nt, synthetic construct
  source 1..20: mol_type = other RNA
accagtttggagggtgctgc

SEQ ID NO: 609 - RNA, 20 nt, synthetic construct
  source 1..20: mol_type = other RNA
accattgagaagatcatccg

SEQ ID NO: 610 - RNA, 20 nt, synthetic construct
  source 1..20: mol_type = other RNA
acccatgggtccaacctaac

SEQ ID NO: 611 - RNA, 20 nt, synthetic construct
  source 1..20: mol_type = other RNA
acccatgggtgcagcaccct

SEQ ID NO: 612 - RNA, 20 nt, synthetic construct
  source 1..20: mol_type = other RNA
accctccaaactggtgtcag

SEQ ID NO: 613 - RNA, 20 nt, synthetic construct
  source 1..20: mol_type = other RNA
acctaaccagtccccagttc

SEQ ID NO: 614 - RNA, 20 nt, synthetic construct
  source 1..20: mol_type = other RNA
acgaataccaggaggccacc

SEQ ID NO: 615 - RNA, 20 nt, synthetic construct
  source 1..20: mol_type = other RNA
actcatctgcaggctctgac

SEQ ID NO: 616 - RNA, 20 nt, synthetic construct
  source 1..20: mol_type = other RNA
actggggactggttaggttg

SEQ ID NO: 617 - RNA, 20 nt, synthetic construct
  source 1..20: mol_type = other RNA
actggtgtcagagcctgcag

SEQ ID NO: 618 - RNA, 20 nt, synthetic construct
  source 1..20: mol_type = other RNA
actggttaggttggacccat

SEQ ID NO: 619 - RNA, 20 nt, synthetic construct
  source 1..20: mol_type = other RNA
agaagatcatccgcttcctg

SEQ ID NO: 620 - RNA, 20 nt, synthetic construct
  source 1..20: mol_type = other RNA
agagcctgcagatgagtccc

SEQ ID NO: 621 - RNA, 20 nt, synthetic construct
  source 1..20: mol_type = other RNA
agatcatccgcttcctgcag

SEQ ID NO: 622 - RNA, 20 nt, synthetic construct
  source 1..20: mol_type = other RNA
agatgagtcccgggaggagc

SEQ ID NO: 623 - RNA, 20 nt, synthetic construct
  source 1..20: mol_type = other RNA
agcaccctccaaactggtgt

SEQ ID NO: 624 - RNA, 20 nt, synthetic construct
  source 1..20: mol_type = other RNA
agcctgcagatgagtcccgg

SEQ ID NO: 625 - RNA, 20 nt, synthetic construct
  source 1..20: mol_type = other RNA
agcggatgatcttctcaatg

SEQ ID NO: 626 - RNA, 20 nt, synthetic construct
  source 1..20: mol_type = other RNA
agcggccctgcaggaagcgg

SEQ ID NO: 627 - RNA, 20 nt, synthetic construct
  source 1..20: mol_type = other RNA
aggaagcggatgatcttctc

SEQ ID NO: 628 - RNA, 20 nt, synthetic construct
  source 1..20: mol_type = other RNA
aggagcggccctgcaggaag

SEQ ID NO: 629 - RNA, 20 nt, synthetic construct
  source 1..20: mol_type = other RNA
aggaggccaccattgagaag

SEQ ID NO: 630 - RNA, 20 nt, synthetic construct
  source 1..20: mol_type = other RNA
aggccaccattgagaagatc

SEQ ID NO: 631 - RNA, 20 nt, synthetic construct
  source 1..20: mol_type = other RNA
aggctctgacaccagtttgg

SEQ ID NO: 632 - RNA, 20 nt, synthetic construct
  source 1..20: mol_type = other RNA
agggccgctcctcccgggac

SEQ ID NO: 633 - RNA, 20 nt, synthetic construct
  source 1..20: mol_type = other RNA
agggctggggaactggggac

SEQ ID NO: 634 - RNA, 20 nt, synthetic construct
  source 1..20: mol_type = other RNA
agggtgctgcacccatgggt

SEQ ID NO: 635 - RNA, 20 nt, synthetic construct
  source 1..20: mol_type = other RNA
aggttggacccatgggtgca

SEQ ID NO: 636 - RNA, 20 nt, synthetic construct
  source 1..20: mol_type = other RNA
agtcccgggaggagcggccc

SEQ ID NO: 637 - RNA, 20 nt, synthetic construct
  source 1..20: mol_type = other RNA
agtttggagggtgctgcacc

SEQ ID NO: 638 - RNA, 20 nt, synthetic construct
  source 1..20: mol_type = other RNA
ataccaggaggccaccattg

SEQ ID NO: 639 - RNA, 20 nt, synthetic construct
  source 1..20: mol_type = other RNA
atcatccgcttcctgcaggg

SEQ ID NO: 640 - RNA, 20 nt, synthetic construct
  source 1..20: mol_type = other RNA
atccgcttcctgcagggccg

SEQ ID NO: 641 - RNA, 20 nt, synthetic construct
  source 1..20: mol_type = other RNA
atctgcaggctctgacacca

SEQ ID NO: 642 - RNA, 20 nt, synthetic construct
  source 1..20: mol_type = other RNA
atcttctcaatggtggcctc

SEQ ID NO: 643 - RNA, 20 nt, synthetic construct
  source 1..20: mol_type = other RNA
atgagtcccgggaggagcgg

SEQ ID NO: 644 - RNA, 20 nt, synthetic construct
  source 1..20: mol_type = other RNA
atgatcttctcaatggtggc

SEQ ID NO: 645 - RNA, 20 nt, synthetic construct
  source 1..20: mol_type = other RNA
atgggtccaacctaaccagt

SEQ ID NO: 646 - RNA, 20 nt, synthetic construct
  source 1..20: mol_type = other RNA
atgggtgcagcaccctccaa

SEQ ID NO: 647 - RNA, 20 nt, synthetic construct
  source 1..20: mol_type = other RNA
atggtggcctcctggtattc

SEQ ID NO: 648 - RNA, 20 nt, synthetic construct
  source 1..20: mol_type = other RNA
attgagaagatcatccgctt

SEQ ID NO: 649 - RNA, 20 nt, synthetic construct
  source 1..20: mol_type = other RNA
caaactggtgtcagagcctg

SEQ ID NO: 650 - RNA, 20 nt, synthetic construct
  source 1..20: mol_type = other RNA
caacctaaccagtccccagt

SEQ ID NO: 651 - RNA, 20 nt, synthetic construct
  source 1..20: mol_type = other RNA
caatggtggcctcctggtat

SEQ ID NO: 652 - RNA, 20 nt, synthetic construct
  source 1..20: mol_type = other RNA
caccagtttggagggtgctg

SEQ ID NO: 653 - RNA, 20 nt, synthetic construct
  source 1..20: mol_type = other RNA
caccattgagaagatcatcc

SEQ ID NO: 654 - RNA, 20 nt, synthetic construct
  source 1..20: mol_type = other RNA
cacccatgggtccaacctaa

SEQ ID NO: 655 - RNA, 20 nt, synthetic construct
  source 1..20: mol_type = other RNA
caccctccaaactggtgtca

SEQ ID NO: 656 - RNA, 20 nt, synthetic construct
  source 1..20: mol_type = other RNA
cacgaataccaggaggccac

SEQ ID NO: 657 - RNA, 20 nt, synthetic construct
  source 1..20: mol_type = other RNA
cagagcctgcagatgagtcc

SEQ ID NO: 658 - RNA, 20 nt, synthetic construct
  source 1..20: mol_type = other RNA
cagatgagtcccgggaggag

SEQ ID NO: 659 - RNA, 20 nt, synthetic construct
  source 1..20: mol_type = other RNA
cagcaccctccaaactggtg

SEQ ID NO: 660 - RNA, 20 nt, synthetic construct
  source 1..20: mol_type = other RNA
caggaagcggatgatcttct

SEQ ID NO: 661 - RNA, 20 nt, synthetic construct
  source 1..20: mol_type = other RNA
caggaggccaccattgagaa

SEQ ID NO: 662 - RNA, 20 nt, synthetic construct
  source 1..20: mol_type = other RNA
caggctctgacaccagtttg

SEQ ID NO: 663 - RNA, 20 nt, synthetic construct
  source 1..20: mol_type = other RNA
cagggccgctcctcccggga

SEQ ID NO: 664 - RNA, 20 nt, synthetic construct
  source 1..20: mol_type = other RNA
cagtttggagggtgctgcac

SEQ ID NO: 665 - RNA, 20 nt, synthetic construct
  source 1..20: mol_type = other RNA
catccgcttcctgcagggcc

SEQ ID NO: 666 - RNA, 20 nt, synthetic construct
  source 1..20: mol_type = other RNA
catctgcaggctctgacacc

SEQ ID NO: 667 - RNA, 20 nt, synthetic construct
  source 1..20: mol_type = other RNA
catgggtccaacctaaccag

SEQ ID NO: 668 - RNA, 20 nt, synthetic construct
  source 1..20: mol_type = other RNA
catgggtgcagcaccctcca

SEQ ID NO: 669 - RNA, 20 nt, synthetic construct
  source 1..20: mol_type = other RNA
cattgagaagatcatccgct

SEQ ID NO: 670 - RNA, 20 nt, synthetic construct
  source 1..20: mol_type = other RNA
ccaaactggtgtcagagcct

SEQ ID NO: 671 - RNA, 20 nt, synthetic construct
  source 1..20: mol_type = other RNA
ccaacctaaccagtccccag

SEQ ID NO: 672 - RNA, 20 nt, synthetic construct
  source 1..20: mol_type = other RNA
ccaccattgagaagatcatc

SEQ ID NO: 673 - RNA, 20 nt, synthetic construct
  source 1..20: mol_type = other RNA
ccacgaataccaggaggcca

SEQ ID NO: 674 - RNA, 20 nt, synthetic construct
  source 1..20: mol_type = other RNA
ccaggaggccaccattgaga

SEQ ID NO: 675 - RNA, 20 nt, synthetic construct
  source 1..20: mol_type = other RNA
ccagtttggagggtgctgca

SEQ ID NO: 676 - RNA, 20 nt, synthetic construct
  source 1..20: mol_type = other RNA
ccatgggtccaacctaacca

SEQ ID NO: 677 - RNA, 20 nt, synthetic construct
  source 1..20: mol_type = other RNA
ccatgggtgcagcaccctcc

SEQ ID NO: 678 - RNA, 20 nt, synthetic construct
  source 1..20: mol_type = other RNA
ccattgagaagatcatccgc

SEQ ID NO: 679 - RNA, 20 nt, synthetic construct
  source 1..20: mol_type = other RNA
cccacgaataccaggaggcc

SEQ ID NO: 680 - RNA, 20 nt, synthetic construct
  source 1..20: mol_type = other RNA
cccatgggtccaacctaacc

SEQ ID NO: 681 - RNA, 20 nt, synthetic construct
  source 1..20: mol_type = other RNA
cccatgggtgcagcaccctc

SEQ ID NO: 682 - RNA, 20 nt, synthetic construct
  source 1..20: mol_type = other RNA
cccgggactcatctgcaggc

SEQ ID NO: 683 - RNA, 20 nt, synthetic construct
  source 1..20: mol_type = other RNA
cccgggaggagcggccctgc

SEQ ID NO: 684 - RNA, 20 nt, synthetic construct
  source 1..20: mol_type = other RNA
ccctccaaactggtgtcaga

SEQ ID NO: 685 - RNA, 20 nt, synthetic construct
  source 1..20: mol_type = other RNA
ccctgcaggaagcggatgat

SEQ ID NO: 686 - RNA, 20 nt, synthetic construct
  source 1..20: mol_type = other RNA
ccgctcctcccgggactcat

SEQ ID NO: 687 - RNA, 20 nt, synthetic construct
  source 1..20: mol_type = other RNA
ccgcttcctgcagggccgct

SEQ ID NO: 688 - RNA, 20 nt, synthetic construct
  source 1..20: mol_type = other RNA
ccgggactcatctgcaggct

SEQ ID NO: 689 - RNA, 20 nt, synthetic construct
  source 1..20: mol_type = other RNA
ccgggaggagcggccctgca

SEQ ID NO: 690 - RNA, 20 nt, synthetic construct
  source 1..20: mol_type = other RNA
cctaaccagtccccagttcc

SEQ ID NO: 691 - RNA, 20 nt, synthetic construct
  source 1..20: mol_type = other RNA
cctccaaactggtgtcagag

SEQ ID NO: 692 - RNA, 20 nt, synthetic construct
  source 1..20: mol_type = other RNA
cctcccgggactcatctgca

SEQ ID NO: 693 - RNA, 20 nt, synthetic construct
  source 1..20: mol_type = other RNA
cctgcagatgagtcccggga

SEQ ID NO: 694 - RNA, 20 nt, synthetic construct
  source 1..20: mol_type = other RNA
cctgcaggaagcggatgatc

SEQ ID NO: 695 - RNA, 20 nt, synthetic construct
  source 1..20: mol_type = other RNA
cctgcagggccgctcctccc

SEQ ID NO: 696 - RNA, 20 nt, synthetic construct
  source 1..20: mol_type = other RNA
cgaataccaggaggccacca

SEQ ID NO: 697 - RNA, 20 nt, synthetic construct
  source 1..20: mol_type = other RNA
cgctcctcccgggactcatc

SEQ ID NO: 698 - RNA, 20 nt, synthetic construct
  source 1..20: mol_type = other RNA
cgcttcctgcagggccgctc

SEQ ID NO: 699 - RNA, 20 nt, synthetic construct
  source 1..20: mol_type = other RNA
cggatgatcttctcaatggt

SEQ ID NO: 700 - RNA, 20 nt, synthetic construct
  source 1..20: mol_type = other RNA
cggccctgcaggaagcggat

SEQ ID NO: 701 - RNA, 20 nt, synthetic construct
  source 1..20: mol_type = other RNA
cgggactcatctgcaggctc

SEQ ID NO: 702 - RNA, 20 nt, synthetic construct
  source 1..20: mol_type = other RNA
cgggaggagcggccctgcag

SEQ ID NO: 703 - RNA, 20 nt, synthetic construct
  source 1..20: mol_type = other RNA
ctcaatggtggcctcctggt

SEQ ID NO: 704 - RNA, 20 nt, synthetic construct
  source 1..20: mol_type = other RNA
ctcatctgcaggctctgaca

SEQ ID NO: 705 - RNA, 20 nt, synthetic construct
  source 1..20: mol_type = other RNA
ctccaaactggtgtcagagc

SEQ ID NO: 706 - RNA, 20 nt, synthetic construct
  source 1..20: mol_type = other RNA
ctcccgggactcatctgcag

SEQ ID NO: 707 - RNA, 20 nt, synthetic construct
  source 1..20: mol_type = other RNA
ctcctcccgggactcatctg

SEQ ID NO: 708 - RNA, 20 nt, synthetic construct
  source 1..20: mol_type = other RNA
ctctgacaccagtttggagg

SEQ ID NO: 709 - RNA, 20 nt, synthetic construct
  source 1..20: mol_type = other RNA
ctgacaccagtttggagggt

SEQ ID NO: 710 - RNA, 20 nt, synthetic construct
  source 1..20: mol_type = other RNA
ctgcacccatgggtccaacc

SEQ ID NO: 711 - RNA, 20 nt, synthetic construct
  source 1..20: mol_type = other RNA
ctgcagatgagtcccgggag

SEQ ID NO: 712 - RNA, 20 nt, synthetic construct
  source 1..20: mol_type = other RNA
ctgcaggaagcggatgatct

SEQ ID NO: 713 - RNA, 20 nt, synthetic construct
  source 1..20: mol_type = other RNA
ctgcaggctctgacaccagt

SEQ ID NO: 714 - RNA, 20 nt, synthetic construct
  source 1..20: mol_type = other RNA
ctgcagggccgctcctcccg

SEQ ID NO: 715 - RNA, 20 nt, synthetic construct
  source 1..20: mol_type = other RNA
ctggggaactggggactggt

SEQ ID NO: 716 - RNA, 20 nt, synthetic construct
  source 1..20: mol_type = other RNA
ctggggactggttaggttgg

SEQ ID NO: 717 - RNA, 20 nt, synthetic construct
  source 1..20: mol_type = other RNA
ctggtgtcagagcctgcaga

SEQ ID NO: 718 - RNA, 20 nt, synthetic construct
  source 1..20: mol_type = other RNA
ctggttaggttggacccatg

SEQ ID NO: 719 - RNA, 20 nt, synthetic construct
  source 1..20: mol_type = other RNA
cttcctgcagggccgctcct

SEQ ID NO: 720 - RNA, 20 nt, synthetic construct
  source 1..20: mol_type = other RNA
cttctcaatggtggcctcct

SEQ ID NO: 721 - RNA, 20 nt, synthetic construct
  source 1..20: mol_type = other RNA
gaactggggactggttaggt

SEQ ID NO: 722 - RNA, 20 nt, synthetic construct
  source 1..20: mol_type = other RNA
gaagatcatccgcttcctgc

SEQ ID NO: 723 - RNA, 20 nt, synthetic construct
  source 1..20: mol_type = other RNA
gaagcggatgatcttctcaa

SEQ ID NO: 724 - RNA, 20 nt, synthetic construct
  source 1..20: mol_type = other RNA
gaataccaggaggccaccat

SEQ ID NO: 725 - RNA, 20 nt, synthetic construct
  source 1..20: mol_type = other RNA
gacaccagtttggagggtgc

SEQ ID NO: 726 - RNA, 20 nt, synthetic construct
  source 1..20: mol_type = other RNA
gacccatgggtgcagcaccc

SEQ ID NO: 727 - RNA, 20 nt, synthetic construct
  source 1..20: mol_type = other RNA
gactcatctgcaggctctga

SEQ ID NO: 728 - RNA, 20 nt, synthetic construct
  source 1..20: mol_type = other RNA
gactggttaggttggaccca

SEQ ID NO: 729 - RNA, 20 nt, synthetic construct
  source 1..20: mol_type = other RNA
gagaagatcatccgcttcct

SEQ ID NO: 730 - RNA, 20 nt, synthetic construct
  source 1..20: mol_type = other RNA
gagcctgcagatgagtcccg

SEQ ID NO: 731 - RNA, 20 nt, synthetic construct
  source 1..20: mol_type = other RNA
gagcggccctgcaggaagcg

SEQ ID NO: 732 - RNA, 20 nt, synthetic construct
  source 1..20: mol_type = other RNA
gaggagcggccctgcaggaa

SEQ ID NO: 733 - RNA, 20 nt, synthetic construct
  source 1..20: mol_type = other RNA
gaggccaccattgagaagat

SEQ ID NO: 734 - RNA, 20 nt, synthetic construct
  source 1..20: mol_type = other RNA
gagggtgctgcacccatggg

SEQ ID NO: 735 - RNA, 20 nt, synthetic construct
  source 1..20: mol_type = other RNA
gagtcccgggaggagcggcc

SEQ ID NO: 736 - RNA, 20 nt, synthetic construct
  source 1..20: mol_type = other RNA
gatcatccgcttcctgcagg

SEQ ID NO: 737 - RNA, 20 nt, synthetic construct
  source 1..20: mol_type = other RNA
gatcttctcaatggtggcct

SEQ ID NO: 738 - RNA, 20 nt, synthetic construct
  source 1..20: mol_type = other RNA
gatgagtcccgggaggagcg

SEQ ID NO: 739 - RNA, 20 nt, synthetic construct
  source 1..20: mol_type = other RNA
gatgatcttctcaatggtgg

SEQ ID NO: 740 - RNA, 20 nt, synthetic construct
  source 1..20: mol_type = other RNA
gcacccatgggtccaaccta

SEQ ID NO: 741 - RNA, 20 nt, synthetic construct
  source 1..20: mol_type = other RNA
gcaccctccaaactggtgtc

SEQ ID NO: 742 - RNA, 20 nt, synthetic construct
  source 1..20: mol_type = other RNA
gcagatgagtcccgggagga

SEQ ID NO: 743 - RNA, 20 nt, synthetic construct
  source 1..20: mol_type = other RNA
gcagcaccctccaaactggt

SEQ ID NO: 744 - RNA, 20 nt, synthetic construct
  source 1..20: mol_type = other RNA
gcaggaagcggatgatcttc

SEQ ID NO: 745 - RNA, 20 nt, synthetic construct
  source 1..20: mol_type = other RNA
gcaggctctgacaccagttt

SEQ ID NO: 746 - RNA, 20 nt, synthetic construct
  source 1..20: mol_type = other RNA
gcagggccgctcctcccggg

SEQ ID NO: 747 - RNA, 20 nt, synthetic construct
  source 1..20: mol_type = other RNA
gccaccattgagaagatcat

SEQ ID NO: 748 - RNA, 20 nt, synthetic construct
  source 1..20: mol_type = other RNA
gccctgcaggaagcggatga

SEQ ID NO: 749 - RNA, 20 nt, synthetic construct
  source 1..20: mol_type = other RNA
gccgctcctcccgggactca

SEQ ID NO: 750 - RNA, 20 nt, synthetic construct
  source 1..20: mol_type = other RNA
gcctgcagatgagtcccggg

SEQ ID NO: 751 - RNA, 20 nt, synthetic construct
  source 1..20: mol_type = other RNA
gcggatgatcttctcaatgg

SEQ ID NO: 752 - RNA, 20 nt, synthetic construct
  source 1..20: mol_type = other RNA
gcggccctgcaggaagcgga

SEQ ID NO: 753 - RNA, 20 nt, synthetic construct
  source 1..20: mol_type = other RNA
gctcctcccgggactcatct

SEQ ID NO: 754 - RNA, 20 nt, synthetic construct
  source 1..20: mol_type = other RNA
gctctgacaccagtttggag

SEQ ID NO: 755 - RNA, 20 nt, synthetic construct
  source 1..20: mol_type = other RNA
gctgcacccatgggtccaac

SEQ ID NO: 756 - RNA, 20 nt, synthetic construct
  source 1..20: mol_type = other RNA
gctggggaactggggactgg

SEQ ID NO: 757 - RNA, 20 nt, synthetic construct
  source 1..20: mol_type = other RNA
gcttcctgcagggccgctcc

SEQ ID NO: 758 - RNA, 20 nt, synthetic construct
  source 1..20: mol_type = other RNA
ggaactggggactggttagg

SEQ ID NO: 759 - RNA, 20 nt, synthetic construct
  source 1..20: mol_type = other RNA
ggaagcggatgatcttctca

SEQ ID NO: 760 - RNA, 20 nt, synthetic construct
  source 1..20: mol_type = other RNA
ggacccatgggtgcagcacc

SEQ ID NO: 761 - RNA, 20 nt, synthetic construct
  source 1..20: mol_type = other RNA
ggactcatctgcaggctctg

SEQ ID NO: 762 - RNA, 20 nt, synthetic construct
  source 1..20: mol_type = other RNA
ggactggttaggttggaccc

SEQ ID NO: 763 - RNA, 20 nt, synthetic construct
  source 1..20: mol_type = other RNA
ggagcggccctgcaggaagc

SEQ ID NO: 764 - RNA, 20 nt, synthetic construct
  source 1..20: mol_type = other RNA
ggaggagcggccctgcagga

SEQ ID NO: 765 - RNA, 20 nt, synthetic construct
  source 1..20: mol_type = other RNA
ggaggccaccattgagaaga

SEQ ID NO: 766 - RNA, 20 nt, synthetic construct
  source 1..20: mol_type = other RNA
ggagggtgctgcacccatgg

SEQ ID NO: 767 - RNA, 20 nt, synthetic construct
  source 1..20: mol_type = other RNA
ggatgatcttctcaatggtg

SEQ ID NO: 768 - RNA, 20 nt, synthetic construct
  source 1..20: mol_type = other RNA
ggccaccattgagaagatca

SEQ ID NO: 769 - RNA, 20 nt, synthetic construct
  source 1..20: mol_type = other RNA
ggccctgcaggaagcggatg

SEQ ID NO: 770 - RNA, 20 nt, synthetic construct
  source 1..20: mol_type = other RNA
ggccgctcctcccgggactc

SEQ ID NO: 771 - RNA, 20 nt, synthetic construct
  source 1..20: mol_type = other RNA
ggctctgacaccagtttgga

SEQ ID NO: 772 - RNA, 20 nt, synthetic construct
  source 1..20: mol_type = other RNA
ggctggggaactggggactg

SEQ ID NO: 773 - RNA, 20 nt, synthetic construct
  source 1..20: mol_type = other RNA
gggaactggggactggttag

SEQ ID NO: 774 - RNA, 20 nt, synthetic construct
  source 1..20: mol_type = other RNA
gggactcatctgcaggctct

SEQ ID NO: 775 - RNA, 20 nt, synthetic construct
  source 1..20: mol_type = other RNA
gggactggttaggttggacc

SEQ ID NO: 776 - RNA, 20 nt, synthetic construct
  source 1..20: mol_type = other RNA
gggaggagcggccctgcagg

SEQ ID NO: 777 - RNA, 20 nt, synthetic construct
  source 1..20: mol_type = other RNA
gggccgctcctcccgggact

SEQ ID NO: 778 - RNA, 20 nt, synthetic construct
  source 1..20: mol_type = other RNA
gggctggggaactggggact

SEQ ID NO: 779 - RNA, 20 nt, synthetic construct
  source 1..20: mol_type = other RNA
ggggaactggggactggtta

SEQ ID NO: 780 - RNA, 20 nt, synthetic construct
  source 1..20: mol_type = other RNA
ggggactggttaggttggac

SEQ ID NO: 781 - RNA, 20 nt, synthetic construct
  source 1..20: mol_type = other RNA
gggtccaacctaaccagtcc

SEQ ID NO: 782 - RNA, 20 nt, synthetic construct
  source 1..20: mol_type = other RNA
gggtgcagcaccctccaaac

SEQ ID NO: 783 - RNA, 20 nt, synthetic construct
  source 1..20: mol_type = other RNA
gggtgctgcacccatgggtc

SEQ ID NO: 784 - RNA, 20 nt, synthetic construct
  source 1..20: mol_type = other RNA
ggtccaacctaaccagtccc

SEQ ID NO: 785 - RNA, 20 nt, synthetic construct
  source 1..20: mol_type = other RNA
ggtcccacgaataccaggag

SEQ ID NO: 786 - RNA, 20 nt, synthetic construct
  source 1..20: mol_type = other RNA
ggtgcagcaccctccaaact

SEQ ID NO: 787 - RNA, 20 nt, synthetic construct
  source 1..20: mol_type = other RNA
ggtgctgcacccatgggtcc

SEQ ID NO: 788 - RNA, 20 nt, synthetic construct
  source 1..20: mol_type = other RNA
ggtggcctcctggtattcgt

SEQ ID NO: 789 - RNA, 20 nt, synthetic construct
  source 1..20: mol_type = other RNA
ggtgtcagagcctgcagatg

SEQ ID NO: 790 - RNA, 20 nt, synthetic construct
  source 1..20: mol_type = other RNA
ggttaggttggacccatggg

SEQ ID NO: 791 - RNA, 20 nt, synthetic construct
  source 1..20: mol_type = other RNA
ggttggacccatgggtgcag

SEQ ID NO: 792 - RNA, 20 nt, synthetic construct
  source 1..20: mol_type = other RNA
gtcagagcctgcagatgagt

SEQ ID NO: 793 - RNA, 20 nt, synthetic construct
  source 1..20: mol_type = other RNA
gtccaacctaaccagtcccc

SEQ ID NO: 794 - RNA, 20 nt, synthetic construct
  source 1..20: mol_type = other RNA
gtcccacgaataccaggagg

SEQ ID NO: 795 - RNA, 20 nt, synthetic construct
  source 1..20: mol_type = other RNA
gtcccgggaggagcggccct

SEQ ID NO: 796 - RNA, 20 nt, synthetic construct
  source 1..20: mol_type = other RNA
gtgcagcaccctccaaactg

SEQ ID NO: 797 - RNA, 20 nt, synthetic construct
  source 1..20: mol_type = other RNA
gtgctgcacccatgggtcca

SEQ ID NO: 798 - RNA, 20 nt, synthetic construct
  source 1..20: mol_type = other RNA
gtggtcccacgaataccagg

SEQ ID NO: 799 - RNA, 20 nt, synthetic construct
  source 1..20: mol_type = other RNA
gtgtcagagcctgcagatga

SEQ ID NO: 800 - RNA, 20 nt, synthetic construct
  source 1..20: mol_type = other RNA
gttaggttggacccatgggt

SEQ ID NO: 801 - RNA, 20 nt, synthetic construct
  source 1..20: mol_type = other RNA
gttggacccatgggtgcagc

SEQ ID NO: 802 - RNA, 20 nt, synthetic construct
  source 1..20: mol_type = other RNA
gtttggagggtgctgcaccc

SEQ ID NO: 803 - RNA, 20 nt, synthetic construct
  source 1..20: mol_type = other RNA
taccaggaggccaccattga

SEQ ID NO: 804 - RNA, 20 nt, synthetic construct
  source 1..20: mol_type = other RNA
taggttggacccatgggtgc

SEQ ID NO: 805 - RNA, 20 nt, synthetic construct
  source 1..20: mol_type = other RNA
tcaatggtggcctcctggta

SEQ ID NO: 806 - RNA, 20 nt, synthetic construct
  source 1..20: mol_type = other RNA
tcagagcctgcagatgagtc

SEQ ID NO: 807 - RNA, 20 nt, synthetic construct
  source 1..20: mol_type = other RNA
tcatccgcttcctgcagggc

SEQ ID NO: 808 - RNA, 20 nt, synthetic construct
  source 1..20: mol_type = other RNA
tcatctgcaggctctgacac

SEQ ID NO: 809 - RNA, 20 nt, synthetic construct
  source 1..20: mol_type = other RNA
tccaaactggtgtcagagcc

SEQ ID NO: 810 - RNA, 20 nt, synthetic construct
  source 1..20: mol_type = other RNA
tccaacctaaccagtcccca

SEQ ID NO: 811 - RNA, 20 nt, synthetic construct
  source 1..20: mol_type = other RNA
tcccacgaataccaggaggc

SEQ ID NO: 812 - RNA, 20 nt, synthetic construct
  source 1..20: mol_type = other RNA
tcccgggactcatctgcagg

SEQ ID NO: 813 - RNA, 20 nt, synthetic construct
  source 1..20: mol_type = other RNA
tcccgggaggagcggccctg

SEQ ID NO: 814 - RNA, 20 nt, synthetic construct
  source 1..20: mol_type = other RNA
tccgcttcctgcagggccgc

SEQ ID NO: 815 - RNA, 20 nt, synthetic construct
  source 1..20: mol_type = other RNA
tcctcccgggactcatctgc

SEQ ID NO: 816 - RNA, 20 nt, synthetic construct
  source 1..20: mol_type = other RNA
tcctgcagggccgctcctcc

SEQ ID NO: 817 - RNA, 20 nt, synthetic construct
  source 1..20: mol_type = other RNA
tctcaatggtggcctcctgg

SEQ ID NO: 818 - RNA, 20 nt, synthetic construct
  source 1..20: mol_type = other RNA
tctgacaccagtttggaggg

SEQ ID NO: 819 - RNA, 20 nt, synthetic construct
  source 1..20: mol_type = other RNA
tctgcaggctctgacaccag

SEQ ID NO: 820 - RNA, 20 nt, synthetic construct
  source 1..20: mol_type = other RNA
tcttctcaatggtggcctcc

SEQ ID NO: 821 - RNA, 20 nt, synthetic construct
  source 1..20: mol_type = other RNA
tgacaccagtttggagggtg

SEQ ID NO: 822 - RNA, 20 nt, synthetic construct
  source 1..20: mol_type = other RNA
tgagaagatcatccgcttcc

SEQ ID NO: 823 - RNA, 20 nt, synthetic construct
  source 1..20: mol_type = other RNA
tgagtcccgggaggagcggc

SEQ ID NO: 824 - RNA, 20 nt, synthetic construct
  source 1..20: mol_type = other RNA
tgatcttctcaatggtggcc

SEQ ID NO: 825 - RNA, 20 nt, synthetic construct
  source 1..20: mol_type = other RNA
tgcacccatgggtccaacct

SEQ ID NO: 826 - RNA, 20 nt, synthetic construct
  source 1..20: mol_type = other RNA
tgcagatgagtcccgggagg

SEQ ID NO: 827 - RNA, 20 nt, synthetic construct
  source 1..20: mol_type = other RNA
tgcagcaccctccaaactgg

SEQ ID NO: 828 - RNA, 20 nt, synthetic construct
  source 1..20: mol_type = other RNA
tgcaggaagcggatgatctt

SEQ ID NO: 829 - RNA, 20 nt, synthetic construct
  source 1..20: mol_type = other RNA
tgcaggctctgacaccagtt

SEQ ID NO: 830 - RNA, 20 nt, synthetic construct
  source 1..20: mol_type = other RNA
tgcagggccgctcctcccgg

SEQ ID NO: 831 - RNA, 20 nt, synthetic construct
  source 1..20: mol_type = other RNA
tgctgcacccatgggtccaa

SEQ ID NO: 832 - RNA, 20 nt, synthetic construct
  source 1..20: mol_type = other RNA
tggacccatgggtgcagcac

SEQ ID NO: 833 - RNA, 20 nt, synthetic construct
  source 1..20: mol_type = other RNA
tggagggtgctgcacccatg

SEQ ID NO: 834 - RNA, 20 nt, synthetic construct
  source 1..20: mol_type = other RNA
tggggaactggggactggtt

SEQ ID NO: 835 - RNA, 20 nt, synthetic construct
  source 1..20: mol_type = other RNA
tggggactggttaggttgga

SEQ ID NO: 836 - RNA, 20 nt, synthetic construct
  source 1..20: mol_type = other RNA
tgggtccaacctaaccagtc

SEQ ID NO: 837 - RNA, 20 nt, synthetic construct
  source 1..20: mol_type = other RNA
tgggtgcagcaccctccaaa

SEQ ID NO: 838 - RNA, 20 nt, synthetic construct
  source 1..20: mol_type = other RNA
tggtcccacgaataccagga

SEQ ID NO: 839 - RNA, 20 nt, synthetic construct
  source 1..20: mol_type = other RNA
tggtggcctcctggtattcg

SEQ ID NO: 840 - RNA, 20 nt, synthetic construct
  source 1..20: mol_type = other RNA
tggtgtcagagcctgcagat

SEQ ID NO: 841 - RNA, 20 nt, synthetic construct
  source 1..20: mol_type = other RNA
tggttaggttggacccatgg

SEQ ID NO: 842 - RNA, 20 nt, synthetic construct
  source 1..20: mol_type = other RNA
tgtcagagcctgcagatgag

SEQ ID NO: 843 - RNA, 20 nt, synthetic construct
  source 1..20: mol_type = other RNA
ttaggttggacccatgggtg

SEQ ID NO: 844 - RNA, 20 nt, synthetic construct
  source 1..20: mol_type = other RNA
ttcctgcagggccgctcctc

SEQ ID NO: 845 - RNA, 20 nt, synthetic construct
  source 1..20: mol_type = other RNA
ttctcaatggtggcctcctg

SEQ ID NO: 846 - RNA, 20 nt, synthetic construct
  source 1..20: mol_type = other RNA
ttgagaagatcatccgcttc

SEQ ID NO: 847 - RNA, 20 nt, synthetic construct
  source 1..20: mol_type = other RNA
ttggacccatgggtgcagca

SEQ ID NO: 848 - RNA, 20 nt, synthetic construct
  source 1..20: mol_type = other RNA
ttggagggtgctgcacccat

SEQ ID NO: 849 - RNA, 20 nt, synthetic construct
  source 1..20: mol_type = other RNA
tttggagggtgctgcaccca

SEQ ID NO: 850 - RNA, 21 nt, synthetic construct
  source 1..21: mol_type = other RNA
aaactggtgtcagagcctgca

SEQ ID NO: 851 - RNA, 21 nt, synthetic construct
  source 1..21: mol_type = other RNA
aacctaaccagtccccagttc

SEQ ID NO: 852 - RNA, 21 nt, synthetic construct
  source 1..21: mol_type = other RNA
aactggggactggttaggttg

SEQ ID NO: 853 - RNA, 21 nt, synthetic construct
  source 1..21: mol_type = other RNA
aactggtgtcagagcctgcag

SEQ ID NO: 854 - RNA, 21 nt, synthetic construct
  source 1..21: mol_type = other RNA
aagatcatccgcttcctgcag

SEQ ID NO: 855 - RNA, 21 nt, synthetic construct
  source 1..21: mol_type = other RNA
aagcggatgatcttctcaatg

SEQ ID NO: 856 - RNA, 21 nt, synthetic construct
  source 1..21: mol_type = other RNA
aataccaggaggccaccattg

SEQ ID NO: 857 - RNA, 21 nt, synthetic construct
  source 1..21: mol_type = other RNA
aatggtggcctcctggtattc

SEQ ID NO: 858 - RNA, 21 nt, synthetic construct
  source 1..21: mol_type = other RNA
acaccagtttggagggtgctg

SEQ ID NO: 859 - RNA, 21 nt, synthetic construct
  source 1..21: mol_type = other RNA
accaggaggccaccattgaga

SEQ ID NO: 860 - RNA, 21 nt, synthetic construct
  source 1..21: mol_type = other RNA
accagtttggagggtgctgca

SEQ ID NO: 861 - RNA, 21 nt, synthetic construct
  source 1..21: mol_type = other RNA
accattgagaagatcatccgc

SEQ ID NO: 862 - RNA, 21 nt, synthetic construct
  source 1..21: mol_type = other RNA
acccatgggtccaacctaacc

SEQ ID NO: 863 - RNA, 21 nt, synthetic construct
  source 1..21: mol_type = other RNA
acccatgggtgcagcaccctc

SEQ ID NO: 864 - RNA, 21 nt, synthetic construct
  source 1..21: mol_type = other RNA
accctccaaactggtgtcaga

SEQ ID NO: 865 - RNA, 21 nt, synthetic construct
  source 1..21: mol_type = other RNA
acctaaccagtccccagttcc

SEQ ID NO: 866 - RNA, 21 nt, synthetic construct
  source 1..21: mol_type = other RNA
acgaataccaggaggccacca

SEQ ID NO: 867 - RNA, 21 nt, synthetic construct
  source 1..21: mol_type = other RNA
actcatctgcaggctctgaca

SEQ ID NO: 868 - RNA, 21 nt, synthetic construct
  source 1..21: mol_type = other RNA
actggggactggttaggttgg

SEQ ID NO: 869 - RNA, 21 nt, synthetic construct
  source 1..21: mol_type = other RNA
actggtgtcagagcctgcaga

SEQ ID NO: 870 - RNA, 21 nt, synthetic construct
  source 1..21: mol_type = other RNA
actggttaggttggacccatg

SEQ ID NO: 871 - RNA, 21 nt, synthetic construct
  source 1..21: mol_type = other RNA
agaagatcatccgcttcctgc

SEQ ID NO: 872 - RNA, 21 nt, synthetic construct
  source 1..21: mol_type = other RNA
agagcctgcagatgagtcccg

SEQ ID NO: 873 - RNA, 21 nt, synthetic construct
  source 1..21: mol_type = other RNA
agatcatccgcttcctgcagg

SEQ ID NO: 874 - RNA, 21 nt, synthetic construct
  source 1..21: mol_type = other RNA
agatgagtcccgggaggagcg

SEQ ID NO: 875 - RNA, 21 nt, synthetic construct
  source 1..21: mol_type = other RNA
agcaccctccaaactggtgtc

SEQ ID NO: 876 - RNA, 21 nt, synthetic construct
  source 1..21: mol_type = other RNA
agcctgcagatgagtcccggg

SEQ ID NO: 877 - RNA, 21 nt, synthetic construct
  source 1..21: mol_type = other RNA
agcggatgatcttctcaatgg

SEQ ID NO: 878 - RNA, 21 nt, synthetic construct
  source 1..21: mol_type = other RNA
agcggccctgcaggaagcgga

SEQ ID NO: 879 - RNA, 21 nt, synthetic construct
  source 1..21: mol_type = other RNA
aggaagcggatgatcttctca

SEQ ID NO: 880 - RNA, 21 nt, synthetic construct
  source 1..21: mol_type = other RNA
aggagcggccctgcaggaagc

SEQ ID NO: 881 - RNA, 21 nt, synthetic construct
  source 1..21: mol_type = other RNA
aggaggccaccattgagaaga

SEQ ID NO: 882 - RNA, 21 nt, synthetic construct
  source 1..21: mol_type = other RNA
aggccaccattgagaagatca

SEQ ID NO: 883 - RNA, 21 nt, synthetic construct
  source 1..21: mol_type = other RNA
aggctctgacaccagtttgga

SEQ ID NO: 884 - RNA, 21 nt, synthetic construct
  source 1..21: mol_type = other RNA
agggccgctcctcccgggact

SEQ ID NO: 885 - RNA, 21 nt, synthetic construct
  source 1..21: mol_type = other RNA
agggctggggaactggggact

SEQ ID NO: 886 - RNA, 21 nt, synthetic construct
  source 1..21: mol_type = other RNA
agggtgctgcacccatgggtc

SEQ ID NO: 887 - RNA, 21 nt, synthetic construct
  source 1..21: mol_type = other RNA
aggttggacccatgggtgcag

SEQ ID NO: 888 - RNA, 21 nt, synthetic construct
  source 1..21: mol_type = other RNA
agtcccgggaggagcggccct

SEQ ID NO: 889 - RNA, 21 nt, synthetic construct
  source 1..21: mol_type = other RNA
agtttggagggtgctgcaccc

SEQ ID NO: 890 - RNA, 21 nt, synthetic construct
  source 1..21: mol_type = other RNA
ataccaggaggccaccattga

SEQ ID NO: 891 - RNA, 21 nt, synthetic construct
  source 1..21: mol_type = other RNA
atcatccgcttcctgcagggc

SEQ ID NO: 892 - RNA, 21 nt, synthetic construct
  source 1..21: mol_type = other RNA
atccgcttcctgcagggccgc

SEQ ID NO: 893 - RNA, 21 nt, synthetic construct
  source 1..21: mol_type = other RNA
atctgcaggctctgacaccag

SEQ ID NO: 894 - RNA, 21 nt, synthetic construct
  source 1..21: mol_type = other RNA
atcttctcaatggtggcctcc

SEQ ID NO: 895 - RNA, 21 nt, synthetic construct
  source 1..21: mol_type = other RNA
atgagtcccgggaggagcggc

SEQ ID NO: 896 - RNA, 21 nt, synthetic construct
  source 1..21: mol_type = other RNA
atgatcttctcaatggtggcc

SEQ ID NO: 897 - RNA, 21 nt, synthetic construct
  source 1..21: mol_type = other RNA
atgggtccaacctaaccagtc

SEQ ID NO: 898 - RNA, 21 nt, synthetic construct
  source 1..21: mol_type = other RNA
atgggtgcagcaccctccaaa

SEQ ID NO: 899 - RNA, 21 nt, synthetic construct
  source 1..21: mol_type = other RNA
atggtggcctcctggtattcg

SEQ ID NO: 900 - RNA, 21 nt, synthetic construct
  source 1..21: mol_type = other RNA
attgagaagatcatccgcttc

SEQ ID NO: 901 - RNA, 21 nt, synthetic construct
  source 1..21: mol_type = other RNA
caaactggtgtcagagcctgc

SEQ ID NO: 902 - RNA, 21 nt, synthetic construct
  source 1..21: mol_type = other RNA
caacctaaccagtccccagtt

SEQ ID NO: 903 - RNA, 21 nt, synthetic construct
  source 1..21: mol_type = other RNA
caatggtggcctcctggtatt

SEQ ID NO: 904 - RNA, 21 nt, synthetic construct
  source 1..21: mol_type = other RNA
caccagtttggagggtgctgc

SEQ ID NO: 905 - RNA, 21 nt, synthetic construct
  source 1..21: mol_type = other RNA
caccattgagaagatcatccg

SEQ ID NO: 906 - RNA, 21 nt, synthetic construct
  source 1..21: mol_type = other RNA
cacccatgggtccaacctaac

SEQ ID NO: 907 - RNA, 21 nt, synthetic construct
  source 1..21: mol_type = other RNA
caccctccaaactggtgtcag

SEQ ID NO: 908 - RNA, 21 nt, synthetic construct
  source 1..21: mol_type = other RNA
cacgaataccaggaggccacc

SEQ ID NO: 909 - RNA, 21 nt, synthetic construct
  source 1..21: mol_type = other RNA
cagagcctgcagatgagtccc

SEQ ID NO: 910 - RNA, 21 nt, synthetic construct
  source 1..21: mol_type = other RNA
cagatgagtcccgggaggagc

SEQ ID NO: 911 - RNA, 21 nt, synthetic construct
  source 1..21: mol_type = other RNA
cagcaccctccaaactggtgt

SEQ ID NO: 912 - RNA, 21 nt, synthetic construct
  source 1..21: mol_type = other RNA
caggaagcggatgatcttctc

SEQ ID NO: 913 - RNA, 21 nt, synthetic construct
  source 1..21: mol_type = other RNA
caggaggccaccattgagaag

SEQ ID NO: 914 - RNA, 21 nt, synthetic construct
  source 1..21: mol_type = other RNA
caggctctgacaccagtttgg

SEQ ID NO: 915 - RNA, 21 nt, synthetic construct
  source 1..21: mol_type = other RNA
cagggccgctcctcccgggac

SEQ ID NO: 916 - RNA, 21 nt, synthetic construct
  source 1..21: mol_type = other RNA
cagtttggagggtgctgcacc

SEQ ID NO: 917 - RNA, 21 nt, synthetic construct
  source 1..21: mol_type = other RNA
catccgcttcctgcagggccg

SEQ ID NO: 918 - RNA, 21 nt, synthetic construct
  source 1..21: mol_type = other RNA
catctgcaggctctgacacca

SEQ ID NO: 919 - RNA, 21 nt, synthetic construct
  source 1..21: mol_type = other RNA
catgggtccaacctaaccagt

SEQ ID NO: 920 - RNA, 21 nt, synthetic construct
  source 1..21: mol_type = other RNA
catgggtgcagcaccctccaa

SEQ ID NO: 921 - RNA, 21 nt, synthetic construct
  source 1..21: mol_type = other RNA
cattgagaagatcatccgctt

SEQ ID NO: 922 - RNA, 21 nt, synthetic construct
  source 1..21: mol_type = other RNA
ccaaactggtgtcagagcctg

SEQ ID NO: 923 - RNA, 21 nt, synthetic construct
  source 1..21: mol_type = other RNA
ccaacctaaccagtccccagt

SEQ ID NO: 924 - RNA, 21 nt, synthetic construct
  source 1..21: mol_type = other RNA
ccaccattgagaagatcatcc

SEQ ID NO: 925 - RNA, 21 nt, synthetic construct
  source 1..21: mol_type = other RNA
ccacgaataccaggaggccac

SEQ ID NO: 926 - RNA, 21 nt, synthetic construct
  source 1..21: mol_type = other RNA
ccaggaggccaccattgagaa

SEQ ID NO: 927 - RNA, 21 nt, synthetic construct
  source 1..21: mol_type = other RNA
ccagtttggagggtgctgcac

SEQ ID NO: 928 - RNA, 21 nt, synthetic construct
  source 1..21: mol_type = other RNA
ccatgggtccaacctaaccag

SEQ ID NO: 929 - RNA, 21 nt, synthetic construct
  source 1..21: mol_type = other RNA
ccatgggtgcagcaccctcca

SEQ ID NO: 930 - RNA, 21 nt, synthetic construct
  source 1..21: mol_type = other RNA
ccattgagaagatcatccgct

SEQ ID NO: 931 - RNA, 21 nt, synthetic construct
  source 1..21: mol_type = other RNA
cccacgaataccaggaggcca

SEQ ID NO: 932 - RNA, 21 nt, synthetic construct
  source 1..21: mol_type = other RNA
cccatgggtccaacctaacca

SEQ ID NO: 933 - RNA, 21 nt, synthetic construct
  source 1..21: mol_type = other RNA
cccatgggtgcagcaccctcc

SEQ ID NO: 934 - RNA, 21 nt, synthetic construct
  source 1..21: mol_type = other RNA
cccgggactcatctgcaggct

SEQ ID NO: 935 - RNA, 21 nt, synthetic construct
  source 1..21: mol_type = other RNA
cccgggaggagcggccctgca

SEQ ID NO: 936 - RNA, 21 nt, synthetic construct
  source 1..21: mol_type = other RNA
ccctccaaactggtgtcagag

SEQ ID NO: 937 - RNA, 21 nt, synthetic construct
  source 1..21: mol_type = other RNA
ccctgcaggaagcggatgatc

SEQ ID NO: 938 - RNA, 21 nt, synthetic construct
  source 1..21: mol_type = other RNA
ccgctcctcccgggactcatc

SEQ ID NO: 939 - RNA, 21 nt, synthetic construct
  source 1..21: mol_type = other RNA
ccgcttcctgcagggccgctc

SEQ ID NO: 940 - RNA, 21 nt, synthetic construct
  source 1..21: mol_type = other RNA
ccgggactcatctgcaggctc

SEQ ID NO: 941 - RNA, 21 nt, synthetic construct
  source 1..21: mol_type = other RNA
ccgggaggagcggccctgcag

SEQ ID NO: 942 - RNA, 21 nt, synthetic construct
  source 1..21: mol_type = other RNA
cctccaaactggtgtcagagc

SEQ ID NO: 943 - RNA, 21 nt, synthetic construct
  source 1..21: mol_type = other RNA
cctcccgggactcatctgcag

SEQ ID NO: 944 - RNA, 21 nt, synthetic construct
  source 1..21: mol_type = other RNA
cctgcagatgagtcccgggag

SEQ ID NO: 945 - RNA, 21 nt, synthetic construct
  source 1..21: mol_type = other RNA
cctgcaggaagcggatgatct

SEQ ID NO: 946 - RNA, 21 nt, synthetic construct
  source 1..21: mol_type = other RNA
cctgcagggccgctcctcccg

SEQ ID NO: 947 - RNA, 21 nt, synthetic construct
  source 1..21: mol_type = other RNA
cgaataccaggaggccaccat

SEQ ID NO: 948 - RNA, 21 nt, synthetic construct
  source 1..21: mol_type = other RNA
cgctcctcccgggactcatct

SEQ ID NO: 949 - RNA, 21 nt, synthetic construct
  source 1..21: mol_type = other RNA
cgcttcctgcagggccgctcc

SEQ ID NO: 950 - RNA, 21 nt, synthetic construct
  source 1..21: mol_type = other RNA
cggatgatcttctcaatggtg

SEQ ID NO: 951 - RNA, 21 nt, synthetic construct
  source 1..21: mol_type = other RNA
cggccctgcaggaagcggatg

SEQ ID NO: 952 - RNA, 21 nt, synthetic construct
  source 1..21: mol_type = other RNA
cgggactcatctgcaggctct

SEQ ID NO: 953 - RNA, 21 nt, synthetic construct
  source 1..21: mol_type = other RNA
cgggaggagcggccctgcagg

SEQ ID NO: 954 - RNA, 21 nt, synthetic construct
  source 1..21: mol_type = other RNA
ctcaatggtggcctcctggta

SEQ ID NO: 955 - RNA, 21 nt, synthetic construct
  source 1..21: mol_type = other RNA
ctcatctgcaggctctgacac

SEQ ID NO: 956 - RNA, 21 nt, synthetic construct
  source 1..21: mol_type = other RNA
ctccaaactggtgtcagagcc

SEQ ID NO: 957 - RNA, 21 nt, synthetic construct
  source 1..21: mol_type = other RNA
ctcccgggactcatctgcagg

SEQ ID NO: 958 - RNA, 21 nt, synthetic construct
  source 1..21: mol_type = other RNA
ctcctcccgggactcatctgc

SEQ ID NO: 959 - RNA, 21 nt, synthetic construct
  source 1..21: mol_type = other RNA
ctctgacaccagtttggaggg

SEQ ID NO: 960 - RNA, 21 nt, synthetic construct
  source 1..21: mol_type = other RNA
ctgacaccagtttggagggtg

SEQ ID NO: 961 - RNA, 21 nt, synthetic construct
  source 1..21: mol_type = other RNA
ctgcacccatgggtccaacct

SEQ ID NO: 962 - RNA, 21 nt, synthetic construct
  source 1..21: mol_type = other RNA
ctgcagatgagtcccgggagg

SEQ ID NO: 963 - RNA, 21 nt, synthetic construct
  source 1..21: mol_type = other RNA
ctgcaggaagcggatgatctt

SEQ ID NO: 964 - RNA, 21 nt, synthetic construct
  source 1..21: mol_type = other RNA
ctgcaggctctgacaccagtt

SEQ ID NO: 965 - RNA, 21 nt, synthetic construct
  source 1..21: mol_type = other RNA
ctgcagggccgctcctcccgg

SEQ ID NO: 966 - RNA, 21 nt, synthetic construct
  source 1..21: mol_type = other RNA
ctggggaactggggactggtt

SEQ ID NO: 967 - RNA, 21 nt, synthetic construct
  source 1..21: mol_type = other RNA
ctggggactggttaggttgga

SEQ ID NO: 968 - RNA, 21 nt, synthetic construct
  source 1..21: mol_type = other RNA
ctggtgtcagagcctgcagat

SEQ ID NO: 969 - RNA, 21 nt, synthetic construct
  source 1..21: mol_type = other RNA
ctggttaggttggacccatgg

SEQ ID NO: 970 - RNA, 21 nt, synthetic construct
  source 1..21: mol_type = other RNA
cttcctgcagggccgctcctc

SEQ ID NO: 971 - RNA, 21 nt, synthetic construct
  source 1..21: mol_type = other RNA
cttctcaatggtggcctcctg

SEQ ID NO: 972 - RNA, 21 nt, synthetic construct
  source 1..21: mol_type = other RNA
gaactggggactggttaggtt

SEQ ID NO: 973 - RNA, 21 nt, synthetic construct
  source 1..21: mol_type = other RNA
gaagatcatccgcttcctgca

SEQ ID NO: 974 - RNA, 21 nt, synthetic construct
  source 1..21: mol_type = other RNA
gaagcggatgatcttctcaat

SEQ ID NO: 975 - RNA, 21 nt, synthetic construct
  source 1..21: mol_type = other RNA
gaataccaggaggccaccatt

SEQ ID NO: 976 - RNA, 21 nt, synthetic construct
  source 1..21: mol_type = other RNA
gacaccagtttggagggtgct

SEQ ID NO: 977 - RNA, 21 nt, synthetic construct
  source 1..21: mol_type = other RNA
gacccatgggtgcagcaccct

SEQ ID NO: 978 - RNA, 21 nt, synthetic construct
  source 1..21: mol_type = other RNA
gactcatctgcaggctctgac

SEQ ID NO: 979 - RNA, 21 nt, synthetic construct
  source 1..21: mol_type = other RNA
gactggttaggttggacccat

SEQ ID NO: 980 - RNA, 21 nt, synthetic construct
  source 1..21: mol_type = other RNA
gagaagatcatccgcttcctg

SEQ ID NO: 981 - RNA, 21 nt, synthetic construct
  source 1..21: mol_type = other RNA
gagcctgcagatgagtcccgg

SEQ ID NO: 982 - RNA, 21 nt, synthetic construct
  source 1..21: mol_type = other RNA
gagcggccctgcaggaagcgg

SEQ ID NO: 983 - RNA, 21 nt, synthetic construct
  source 1..21: mol_type = other RNA
gaggagcggccctgcaggaag

SEQ ID NO: 984 - RNA, 21 nt, synthetic construct
  source 1..21: mol_type = other RNA
gaggccaccattgagaagatc

SEQ ID NO: 985 - RNA, 21 nt, synthetic construct
  source 1..21: mol_type = other RNA
gagggtgctgcacccatgggt

SEQ ID NO: 986 - RNA, 21 nt, synthetic construct
  source 1..21: mol_type = other RNA
gagtcccgggaggagcggccc

SEQ ID NO: 987 - RNA, 21 nt, synthetic construct
  source 1..21: mol_type = other RNA
gatcatccgcttcctgcaggg

SEQ ID NO: 988 - RNA, 21 nt, synthetic construct
  source 1..21: mol_type = other RNA
gatcttctcaatggtggcctc

SEQ ID NO: 989 - RNA, 21 nt, synthetic construct
  source 1..21: mol_type = other RNA
gatgagtcccgggaggagcgg

SEQ ID NO: 990 - RNA, 21 nt, synthetic construct
  source 1..21: mol_type = other RNA
gatgatcttctcaatggtggc

SEQ ID NO: 991 - RNA, 21 nt, synthetic construct
  source 1..21: mol_type = other RNA
gcacccatgggtccaacctaa

SEQ ID NO: 992 - RNA, 21 nt, synthetic construct
  source 1..21: mol_type = other RNA
gcaccctccaaactggtgtca

SEQ ID NO: 993 - RNA, 21 nt, synthetic construct
  source 1..21: mol_type = other RNA
gcagatgagtcccgggaggag

SEQ ID NO: 994 - RNA, 21 nt, synthetic construct
  source 1..21: mol_type = other RNA
gcagcaccctccaaactggtg

SEQ ID NO: 995 - RNA, 21 nt, synthetic construct
  source 1..21: mol_type = other RNA
gcaggaagcggatgatcttct

SEQ ID NO: 996 - RNA, 21 nt, synthetic construct
  source 1..21: mol_type = other RNA
gcaggctctgacaccagtttg

SEQ ID NO: 997 - RNA, 21 nt, synthetic construct
  source 1..21: mol_type = other RNA
gcagggccgctcctcccggga

SEQ ID NO: 998 - RNA, 21 nt, synthetic construct
  source 1..21: mol_type = other RNA
gccaccattgagaagatcatc

SEQ ID NO: 999 - RNA, 21 nt, synthetic construct
  source 1..21: mol_type = other RNA
gccctgcaggaagcggatgat

SEQ ID NO: 1000 - RNA, 21 nt, synthetic construct
  source 1..21: mol_type = other RNA
gccgctcctcccgggactcat

SEQ ID NO: 1001 - RNA, 21 nt, synthetic construct
  source 1..21: mol_type = other RNA
gcctgcagatgagtcccggga

SEQ ID NO: 1002 - RNA, 21 nt, synthetic construct
  source 1..21: mol_type = other RNA
gcggatgatcttctcaatggt

SEQ ID NO: 1003 - RNA, 21 nt, synthetic construct
  source 1..21: mol_type = other RNA
gcggccctgcaggaagcggat

SEQ ID NO: 1004 - RNA, 21 nt, synthetic construct
  source 1..21: mol_type = other RNA
gctcctcccgggactcatctg

SEQ ID NO: 1005 - RNA, 21 nt, synthetic construct
  source 1..21: mol_type = other RNA
gctctgacaccagtttggagg

SEQ ID NO: 1006 - RNA, 21 nt, synthetic construct
  source 1..21: mol_type = other RNA
gctgcacccatgggtccaacc

SEQ ID NO: 1007 - RNA, 21 nt, synthetic construct
  source 1..21: mol_type = other RNA
gctggggaactggggactggt

SEQ ID NO: 1008 - RNA, 21 nt, synthetic construct
  source 1..21: mol_type = other RNA
gcttcctgcagggccgctcct

SEQ ID NO: 1009 - RNA, 21 nt, synthetic construct
  source 1..21: mol_type = other RNA
ggaactggggactggttaggt

SEQ ID NO: 1010 - RNA, 21 nt, synthetic construct
  source 1..21: mol_type = other RNA
ggaagcggatgatcttctcaa

SEQ ID NO: 1011 - RNA, 21 nt, synthetic construct
  source 1..21: mol_type = other RNA
ggacccatgggtgcagcaccc

SEQ ID NO: 1012 - RNA, 21 nt, synthetic construct
  source 1..21: mol_type = other RNA
ggactcatctgcaggctctga

SEQ ID NO: 1013 - RNA, 21 nt, synthetic construct
  source 1..21: mol_type = other RNA
ggactggttaggttggaccca

SEQ ID NO: 1014 - RNA, 21 nt, synthetic construct
  source 1..21: mol_type = other RNA
ggagcggccctgcaggaagcg

SEQ ID NO: 1015 - RNA, 21 nt, synthetic construct
  source 1..21: mol_type = other RNA
ggaggagcggccctgcaggaa

SEQ ID NO: 1016 - RNA, 21 nt, synthetic construct
  source 1..21: mol_type = other RNA
ggaggccaccattgagaagat

SEQ ID NO: 1017 - RNA, 21 nt, synthetic construct
  source 1..21: mol_type = other RNA
ggagggtgctgcacccatggg

SEQ ID NO: 1018 - RNA, 21 nt, synthetic construct
  source 1..21: mol_type = other RNA
ggatgatcttctcaatggtgg

SEQ ID NO: 1019 - RNA, 21 nt, synthetic construct
  source 1..21: mol_type = other RNA
ggccaccattgagaagatcat

SEQ ID NO: 1020 - RNA, 21 nt, synthetic construct
  source 1..21: mol_type = other RNA
ggccctgcaggaagcggatga

SEQ ID NO: 1021 - RNA, 21 nt, synthetic construct
  source 1..21: mol_type = other RNA
ggccgctcctcccgggactca

SEQ ID NO: 1022 - RNA, 21 nt, synthetic construct
  source 1..21: mol_type = other RNA
ggctctgacaccagtttggag

SEQ ID NO: 1023 - RNA, 21 nt, synthetic construct
  source 1..21: mol_type = other RNA
ggctggggaactggggactgg

SEQ ID NO: 1024 - RNA, 21 nt, synthetic construct
  source 1..21: mol_type = other RNA
gggaactggggactggttagg

SEQ ID NO: 1025 - RNA, 21 nt, synthetic construct
  source 1..21: mol_type = other RNA
gggactcatctgcaggctctg

SEQ ID NO: 1026 - RNA, 21 nt, synthetic construct
  source 1..21: mol_type = other RNA
gggactggttaggttggaccc

SEQ ID NO: 1027 - RNA, 21 nt, synthetic construct
  source 1..21: mol_type = other RNA
gggaggagcggccctgcagga

SEQ ID NO: 1028 - RNA, 21 nt, synthetic construct
  source 1..21: mol_type = other RNA
gggccgctcctcccgggactc

SEQ ID NO: 1029 - RNA, 21 nt, synthetic construct
  source 1..21: mol_type = other RNA
gggctggggaactggggactg

SEQ ID NO: 1030 - RNA, 21 nt, synthetic construct
  source 1..21: mol_type = other RNA
ggggaactggggactggttag

SEQ ID NO: 1031 - RNA, 21 nt, synthetic construct
  source 1..21: mol_type = other RNA
ggggactggttaggttggacc

SEQ ID NO: 1032 - RNA, 21 nt, synthetic construct
  source 1..21: mol_type = other RNA
gggtccaacctaaccagtccc

SEQ ID NO: 1033 - RNA, 21 nt, synthetic construct
  source 1..21: mol_type = other RNA
gggtgcagcaccctccaaact

SEQ ID NO: 1034 - RNA, 21 nt, synthetic construct
  source 1..21: mol_type = other RNA
gggtgctgcacccatgggtcc

SEQ ID NO: 1035 - RNA, 21 nt, synthetic construct
  source 1..21: mol_type = other RNA
ggtccaacctaaccagtcccc

SEQ ID NO: 1036 - RNA, 21 nt, synthetic construct
  source 1..21: mol_type = other RNA
ggtcccacgaataccaggagg

SEQ ID NO: 1037 - RNA, 21 nt, synthetic construct
  source 1..21: mol_type = other RNA
ggtgcagcaccctccaaactg

SEQ ID NO: 1038 - RNA, 21 nt, synthetic construct
  source 1..21: mol_type = other RNA
ggtgctgcacccatgggtcca

SEQ ID NO: 1039 - RNA, 21 nt, synthetic construct
  source 1..21: mol_type = other RNA
ggtgtcagagcctgcagatga

SEQ ID NO: 1040 - RNA, 21 nt, synthetic construct
  source 1..21: mol_type = other RNA
ggttaggttggacccatgggt

SEQ ID NO: 1041 - RNA, 21 nt, synthetic construct
  source 1..21: mol_type = other RNA
ggttggacccatgggtgcagc

SEQ ID NO: 1042 - RNA, 21 nt, synthetic construct
  source 1..21: mol_type = other RNA
gtcagagcctgcagatgagtc

SEQ ID NO: 1043 - RNA, 21 nt, synthetic construct
  source 1..21: mol_type = other RNA
gtccaacctaaccagtcccca

SEQ ID NO: 1044 - RNA, 21 nt, synthetic construct
  source 1..21: mol_type = other RNA
gtcccacgaataccaggaggc

SEQ ID NO: 1045 - RNA, 21 nt, synthetic construct
  source 1..21: mol_type = other RNA
gtcccgggaggagcggccctg

SEQ ID NO: 1046 - RNA, 21 nt, synthetic construct
  source 1..21: mol_type = other RNA
gtgcagcaccctccaaactgg

SEQ ID NO: 1047 - RNA, 21 nt, synthetic construct
  source 1..21: mol_type = other RNA
gtgctgcacccatgggtccaa

SEQ ID NO: 1048 - RNA, 21 nt, synthetic construct
  source 1..21: mol_type = other RNA
gtggtcccacgaataccagga

SEQ ID NO: 1049 - RNA, 21 nt, synthetic construct
  source 1..21: mol_type = other RNA
gtgtcagagcctgcagatgag

SEQ ID NO: 1050 - RNA, 21 nt, synthetic construct
  source 1..21: mol_type = other RNA
gttaggttggacccatgggtg

SEQ ID NO: 1051 - RNA, 21 nt, synthetic construct
  source 1..21: mol_type = other RNA
gttggacccatgggtgcagca

SEQ ID NO: 1052 - RNA, 21 nt, synthetic construct
  source 1..21: mol_type = other RNA
gtttggagggtgctgcaccca

SEQ ID NO: 1053 - RNA, 21 nt, synthetic construct
  source 1..21: mol_type = other RNA
taccaggaggccaccattgag

SEQ ID NO: 1054 - RNA, 21 nt, synthetic construct
  source 1..21: mol_type = other RNA
taggttggacccatgggtgca

SEQ ID NO: 1055 - RNA, 21 nt, synthetic construct
  source 1..21: mol_type = other RNA
tcaatggtggcctcctggtat

SEQ ID NO: 1056 - RNA, 21 nt, synthetic construct
  source 1..21: mol_type = other RNA
tcagagcctgcagatgagtcc

SEQ ID NO: 1057 - RNA, 21 nt, synthetic construct
  source 1..21: mol_type = other RNA
tcatccgcttcctgcagggcc

SEQ ID NO: 1058 - RNA, 21 nt, synthetic construct
  source 1..21: mol_type = other RNA
tcatctgcaggctctgacacc

SEQ ID NO: 1059 - RNA, 21 nt, synthetic construct
  source 1..21: mol_type = other RNA
tccaaactggtgtcagagcct

SEQ ID NO: 1060 - RNA, 21 nt, synthetic construct
  source 1..21: mol_type = other RNA
tccaacctaaccagtccccag

SEQ ID NO: 1061 - RNA, 21 nt, synthetic construct
  source 1..21: mol_type = other RNA
tcccacgaataccaggaggcc

SEQ ID NO: 1062 - RNA, 21 nt, synthetic construct
  source 1..21: mol_type = other RNA
tcccgggactcatctgcaggc

SEQ ID NO: 1063 - RNA, 21 nt, synthetic construct
  source 1..21: mol_type = other RNA
tcccgggaggagcggccctgc

SEQ ID NO: 1064 - RNA, 21 nt, synthetic construct
  source 1..21: mol_type = other RNA
tccgcttcctgcagggccgct

SEQ ID NO: 1065 - RNA, 21 nt, synthetic construct
  source 1..21: mol_type = other RNA
tcctcccgggactcatctgca

SEQ ID NO: 1066 - RNA, 21 nt, synthetic construct
  source 1..21: mol_type = other RNA
tcctgcagggccgctcctccc

SEQ ID NO: 1067 - RNA, 21 nt, synthetic construct
  source 1..21: mol_type = other RNA
tctcaatggtggcctcctggt

SEQ ID NO: 1068 - RNA, 21 nt, synthetic construct
  source 1..21: mol_type = other RNA
tctgacaccagtttggagggt

SEQ ID NO: 1069 - RNA, 21 nt, synthetic construct
  source 1..21: mol_type = other RNA
tctgcaggctctgacaccagt

SEQ ID NO: 1070 - RNA, 21 nt, synthetic construct
  source 1..21: mol_type = other RNA
tcttctcaatggtggcctcct

SEQ ID NO: 1071 - RNA, 21 nt, synthetic construct
  source 1..21: mol_type = other RNA
tgacaccagtttggagggtgc

SEQ ID NO: 1072 - RNA, 21 nt, synthetic construct
  source 1..21: mol_type = other RNA
tgagaagatcatccgcttcct

SEQ ID NO: 1073 - RNA, 21 nt, synthetic construct
  source 1..21: mol_type = other RNA
tgagtcccgggaggagcggcc

SEQ ID NO: 1074 - RNA, 21 nt, synthetic construct
  source 1..21: mol_type = other RNA
tgatcttctcaatggtggcct

SEQ ID NO: 1075 - RNA, 21 nt, synthetic construct
  source 1..21: mol_type = other RNA
tgcacccatgggtccaaccta

SEQ ID NO: 1076 - RNA, 21 nt, synthetic construct
  source 1..21: mol_type = other RNA
tgcagatgagtcccgggagga

SEQ ID NO: 1077 - RNA, 21 nt, synthetic construct
  source 1..21: mol_type = other RNA
tgcagcaccctccaaactggt

SEQ ID NO: 1078 - RNA, 21 nt, synthetic construct
  source 1..21: mol_type = other RNA
tgcaggaagcggatgatcttc

SEQ ID NO: 1079 - RNA, 21 nt, synthetic construct
  source 1..21: mol_type = other RNA
tgcaggctctgacaccagttt

SEQ ID NO: 1080 - RNA, 21 nt, synthetic construct
  source 1..21: mol_type = other RNA
tgcagggccgctcctcccggg

SEQ ID NO: 1081 - RNA, 21 nt, synthetic construct
  source 1..21: mol_type = other RNA
tgctgcacccatgggtccaac

SEQ ID NO: 1082 - RNA, 21 nt, synthetic construct
  source 1..21: mol_type = other RNA
tggacccatgggtgcagcacc

SEQ ID NO: 1083 - RNA, 21 nt, synthetic construct
  source 1..21: mol_type = other RNA
tggagggtgctgcacccatgg

SEQ ID NO: 1084 - RNA, 21 nt, synthetic construct
  source 1..21: mol_type = other RNA
tggggaactggggactggtta

SEQ ID NO: 1085 - RNA, 21 nt, synthetic construct
  source 1..21: mol_type = other RNA
tggggactggttaggttggac

SEQ ID NO: 1086 - RNA, 21 nt, synthetic construct
  source 1..21: mol_type = other RNA
tgggtccaacctaaccagtcc

SEQ ID NO: 1087 - RNA, 21 nt, synthetic construct
  source 1..21: mol_type = other RNA
tgggtgcagcaccctccaaac

SEQ ID NO: 1088 - RNA, 21 nt, synthetic construct
  source 1..21: mol_type = other RNA
tggtcccacgaataccaggag

SEQ ID NO: 1089 - RNA, 21 nt, synthetic construct
  source 1..21: mol_type = other RNA
tggtggcctcctggtattcgt

SEQ ID NO: 1090 - RNA, 21 nt, synthetic construct
  source 1..21: mol_type = other RNA
tggtgtcagagcctgcagatg

SEQ ID NO: 1091 - RNA, 21 nt, synthetic construct
  source 1..21: mol_type = other RNA
tggttaggttggacccatggg

SEQ ID NO: 1092 - RNA, 21 nt, synthetic construct
  source 1..21: mol_type = other RNA
tgtcagagcctgcagatgagt

SEQ ID NO: 1093 - RNA, 21 nt, synthetic construct
  source 1..21: mol_type = other RNA
ttaggttggacccatgggtgc

SEQ ID NO: 1094 - RNA, 21 nt, synthetic construct
  source 1..21: mol_type = other RNA
ttcctgcagggccgctcctcc

SEQ ID NO: 1095 - RNA, 21 nt, synthetic construct
  source 1..21: mol_type = other RNA
ttctcaatggtggcctcctgg

SEQ ID NO: 1096 - RNA, 21 nt, synthetic construct
  source 1..21: mol_type = other RNA
ttgagaagatcatccgcttcc

SEQ ID NO: 1097 - RNA, 21 nt, synthetic construct
  source 1..21: mol_type = other RNA
ttggacccatgggtgcagcac

SEQ ID NO: 1098 - RNA, 21 nt, synthetic construct
  source 1..21: mol_type = other RNA
ttggagggtgctgcacccatg

SEQ ID NO: 1099 - RNA, 21 nt, synthetic construct
  source 1..21: mol_type = other RNA
tttggagggtgctgcacccat

SEQ ID NO: 1100 - RNA, 22 nt, synthetic construct
  source 1..22: mol_type = other RNA
aaactggtgtcagagcctgcag

SEQ ID NO: 1101 - RNA, 22 nt, synthetic construct
  source 1..22: mol_type = other RNA
aacctaaccagtccccagttcc

SEQ ID NO: 1102 - RNA, 22 nt, synthetic construct
  source 1..22: mol_type = other RNA
aactggggactggttaggttgg

SEQ ID NO: 1103 - RNA, 22 nt, synthetic construct
  source 1..22: mol_type = other RNA
aactggtgtcagagcctgcaga

SEQ ID NO: 1104 - RNA, 22 nt, synthetic construct
  source 1..22: mol_type = other RNA
aagatcatccgcttcctgcagg

SEQ ID NO: 1105 - RNA, 22 nt, synthetic construct
  source 1..22: mol_type = other RNA
aagcggatgatcttctcaatgg

SEQ ID NO: 1106 - RNA, 22 nt, synthetic construct
  source 1..22: mol_type = other RNA
aataccaggaggccaccattga

SEQ ID NO: 1107 - RNA, 22 nt, synthetic construct
  source 1..22: mol_type = other RNA
aatggtggcctcctggtattcg

SEQ ID NO: 1108 - RNA, 22 nt, synthetic construct
  source 1..22: mol_type = other RNA
acaccagtttggagggtgctgc

SEQ ID NO: 1109 - RNA, 22 nt, synthetic construct
  source 1..22: mol_type = other RNA
accaggaggccaccattgagaa

SEQ ID NO: 1110 - RNA, 22 nt, synthetic construct
  source 1..22: mol_type = other RNA
accagtttggagggtgctgcac

SEQ ID NO: 1111 - RNA, 22 nt, synthetic construct
  source 1..22: mol_type = other RNA
accattgagaagatcatccgct

SEQ ID NO: 1112 - RNA, 22 nt, synthetic construct
  source 1..22: mol_type = other RNA
acccatgggtccaacctaacca

SEQ ID NO: 1113 - RNA, 22 nt, synthetic construct
  source 1..22: mol_type = other RNA
acccatgggtgcagcaccctcc

SEQ ID NO: 1114 - RNA, 22 nt, synthetic construct
  source 1..22: mol_type = other RNA
accctccaaactggtgtcagag

SEQ ID NO: 1115 - RNA, 22 nt, synthetic construct
  source 1..22: mol_type = other RNA
acgaataccaggaggccaccat

SEQ ID NO: 1116 - RNA, 22 nt, synthetic construct
  source 1..22: mol_type = other RNA
actcatctgcaggctctgacac

SEQ ID NO: 1117 - RNA, 22 nt, synthetic construct
  source 1..22: mol_type = other RNA
actggggactggttaggttgga

SEQ ID NO: 1118 - RNA, 22 nt, synthetic construct
  source 1..22: mol_type = other RNA
actggtgtcagagcctgcagat

SEQ ID NO: 1119 - RNA, 22 nt, synthetic construct
  source 1..22: mol_type = other RNA
actggttaggttggacccatgg

SEQ ID NO: 1120 - RNA, 22 nt, synthetic construct
  source 1..22: mol_type = other RNA
agaagatcatccgcttcctgca

SEQ ID NO: 1121 - RNA, 22 nt, synthetic construct
  source 1..22: mol_type = other RNA
agagcctgcagatgagtcccgg

SEQ ID NO: 1122 - RNA, 22 nt, synthetic construct
  source 1..22: mol_type = other RNA
agatcatccgcttcctgcaggg

SEQ ID NO: 1123 - RNA, 22 nt, synthetic construct
  source 1..22: mol_type = other RNA
agatgagtcccgggaggagcgg

SEQ ID NO: 1124 - RNA, 22 nt, synthetic construct
  source 1..22: mol_type = other RNA
agcaccctccaaactggtgtca

SEQ ID NO: 1125 - RNA, 22 nt, synthetic construct
  source 1..22: mol_type = other RNA
agcctgcagatgagtcccggga

SEQ ID NO: 1126 - RNA, 22 nt, synthetic construct
  source 1..22: mol_type = other RNA
agcggatgatcttctcaatggt

SEQ ID NO: 1127 - RNA, 22 nt, synthetic construct
  source 1..22: mol_type = other RNA
agcggccctgcaggaagcggat

SEQ ID NO: 1128 - RNA, 22 nt, synthetic construct
  source 1..22: mol_type = other RNA
aggaagcggatgatcttctcaa

SEQ ID NO: 1129 - RNA, 22 nt, synthetic construct
  source 1..22: mol_type = other RNA
aggagcggccctgcaggaagcg

SEQ ID NO: 1130 - RNA, 22 nt, synthetic construct
  source 1..22: mol_type = other RNA
aggaggccaccattgagaagat

SEQ ID NO: 1131 - RNA, 22 nt, synthetic construct
  source 1..22: mol_type = other RNA
aggccaccattgagaagatcat

SEQ ID NO: 1132 - RNA, 22 nt, synthetic construct
  source 1..22: mol_type = other RNA
aggctctgacaccagtttggag

SEQ ID NO: 1133 - RNA, 22 nt, synthetic construct
  source 1..22: mol_type = other RNA
agggccgctcctcccgggactc

SEQ ID NO: 1134 - RNA, 22 nt, synthetic construct
  source 1..22: mol_type = other RNA
agggctggggaactggggactg

SEQ ID NO: 1135 - RNA, 22 nt, synthetic construct
  source 1..22: mol_type = other RNA
agggtgctgcacccatgggtcc

SEQ ID NO: 1136 - RNA, 22 nt, synthetic construct
  source 1..22: mol_type = other RNA
aggttggacccatgggtgcagc

SEQ ID NO: 1137 - RNA, 22 nt, synthetic construct
  source 1..22: mol_type = other RNA
agtcccgggaggagcggccctg

SEQ ID NO: 1138 - RNA, 22 nt, synthetic construct
  source 1..22: mol_type = other RNA
agtttggagggtgctgcaccca

SEQ ID NO: 1139 - RNA, 22 nt, synthetic construct
  source 1..22: mol_type = other RNA
ataccaggaggccaccattgag

SEQ ID NO: 1140 - RNA, 22 nt, synthetic construct
  source 1..22: mol_type = other RNA
atcatccgcttcctgcagggcc

SEQ ID NO: 1141 - RNA, 22 nt, synthetic construct
  source 1..22: mol_type = other RNA
atccgcttcctgcagggccgct

SEQ ID NO: 1142 - RNA, 22 nt, synthetic construct
  source 1..22: mol_type = other RNA
atctgcaggctctgacaccagt

SEQ ID NO: 1143 - RNA, 22 nt, synthetic construct
  source 1..22: mol_type = other RNA
atcttctcaatggtggcctcct

SEQ ID NO: 1144 - RNA, 22 nt, synthetic construct
  source 1..22: mol_type = other RNA
atgagtcccgggaggagcggcc

SEQ ID NO: 1145 - RNA, 22 nt, synthetic construct
  source 1..22: mol_type = other RNA
atgatcttctcaatggtggcct

SEQ ID NO: 1146 - RNA, 22 nt, synthetic construct
  source 1..22: mol_type = other RNA
atgggtccaacctaaccagtcc

SEQ ID NO: 1147 - RNA, 22 nt, synthetic construct
  source 1..22: mol_type = other RNA
atgggtgcagcaccctccaaac

SEQ ID NO: 1148 - RNA, 22 nt, synthetic construct
  source 1..22: mol_type = other RNA
atggtggcctcctggtattcgt

SEQ ID NO: 1149 - RNA, 22 nt, synthetic construct
  source 1..22: mol_type = other RNA
attgagaagatcatccgcttcc

SEQ ID NO: 1150 - RNA, 22 nt, synthetic construct
  source 1..22: mol_type = other RNA
caaactggtgtcagagcctgca

SEQ ID NO: 1151 - RNA, 22 nt, synthetic construct
  source 1..22: mol_type = other RNA
caacctaaccagtccccagttc

SEQ ID NO: 1152 - RNA, 22 nt, synthetic construct
  source 1..22: mol_type = other RNA
caatggtggcctcctggtattc

SEQ ID NO: 1153 - RNA, 22 nt, synthetic construct
  source 1..22: mol_type = other RNA
caccagtttggagggtgctgca

SEQ ID NO: 1154 - RNA, 22 nt, synthetic construct
  source 1..22: mol_type = other RNA
caccattgagaagatcatccgc

SEQ ID NO: 1155 - RNA, 22 nt, synthetic construct
  source 1..22: mol_type = other RNA
cacccatgggtccaacctaacc

SEQ ID NO: 1156 - RNA, 22 nt, synthetic construct
  source 1..22: mol_type = other RNA
caccctccaaactggtgtcaga

SEQ ID NO: 1157 - RNA, 22 nt, synthetic construct
  source 1..22: mol_type = other RNA
cacgaataccaggaggccacca

SEQ ID NO: 1158 - RNA, 22 nt, synthetic construct
  source 1..22: mol_type = other RNA
cagagcctgcagatgagtcccg

SEQ ID NO: 1159 - RNA, 22 nt, synthetic construct
  source 1..22: mol_type = other RNA
cagatgagtcccgggaggagcg

SEQ ID NO: 1160 - RNA, 22 nt, synthetic construct
  source 1..22: mol_type = other RNA
cagcaccctccaaactggtgtc

SEQ ID NO: 1161 - RNA, 22 nt, synthetic construct
  source 1..22: mol_type = other RNA
caggaagcggatgatcttctca

SEQ ID NO: 1162 - RNA, 22 nt, synthetic construct
  source 1..22: mol_type = other RNA
caggaggccaccattgagaaga

SEQ ID NO: 1163 - RNA, 22 nt, synthetic construct
  source 1..22: mol_type = other RNA
caggctctgacaccagtttgga

SEQ ID NO: 1164 - RNA, 22 nt, synthetic construct
  source 1..22: mol_type = other RNA
cagggccgctcctcccgggact

SEQ ID NO: 1165 - RNA, 22 nt, synthetic construct
  source 1..22: mol_type = other RNA
cagtttggagggtgctgcaccc

SEQ ID NO: 1166 - RNA, 22 nt, synthetic construct
  source 1..22: mol_type = other RNA
catccgcttcctgcagggccgc

SEQ ID NO: 1167 - RNA, 22 nt, synthetic construct
  source 1..22: mol_type = other RNA
catctgcaggctctgacaccag

SEQ ID NO: 1168 - RNA, 22 nt, synthetic construct
  source 1..22: mol_type = other RNA
catgggtccaacctaaccagtc

SEQ ID NO: 1169 - RNA, 22 nt, synthetic construct
  source 1..22: mol_type = other RNA
catgggtgcagcaccctccaaa

SEQ ID NO: 1170 - RNA, 22 nt, synthetic construct
  source 1..22: mol_type = other RNA
cattgagaagatcatccgcttc

SEQ ID NO: 1171 - RNA, 22 nt, synthetic construct
  source 1..22: mol_type = other RNA
ccaaactggtgtcagagcctgc

SEQ ID NO: 1172 - RNA, 22 nt, synthetic construct
  source 1..22: mol_type = other RNA
ccaacctaaccagtccccagtt

SEQ ID NO: 1173 - RNA, 22 nt, synthetic construct
  source 1..22: mol_type = other RNA
ccaccattgagaagatcatccg

SEQ ID NO: 1174 - RNA, 22 nt, synthetic construct
  source 1..22: mol_type = other RNA
ccacgaataccaggaggccacc

SEQ ID NO: 1175 - RNA, 22 nt, synthetic construct
  source 1..22: mol_type = other RNA
ccaggaggccaccattgagaag

SEQ ID NO: 1176 - RNA, 22 nt, synthetic construct
  source 1..22: mol_type = other RNA
ccagtttggagggtgctgcacc

SEQ ID NO: 1177 - RNA, 22 nt, synthetic construct
  source 1..22: mol_type = other RNA
ccatgggtccaacctaaccagt

SEQ ID NO: 1178 - RNA, 22 nt, synthetic construct
  source 1..22: mol_type = other RNA
ccatgggtgcagcaccctccaa

SEQ ID NO: 1179 - RNA, 22 nt, synthetic construct
  source 1..22: mol_type = other RNA
ccattgagaagatcatccgctt

SEQ ID NO: 1180 - RNA, 22 nt, synthetic construct
  source 1..22: mol_type = other RNA
cccacgaataccaggaggccac

SEQ ID NO: 1181 - RNA, 22 nt, synthetic construct
  source 1..22: mol_type = other RNA
cccatgggtccaacctaaccag

SEQ ID NO: 1182 - RNA, 22 nt, synthetic construct
  source 1..22: mol_type = other RNA
cccatgggtgcagcaccctcca

SEQ ID NO: 1183 - RNA, 22 nt, synthetic construct
  source 1..22: mol_type = other RNA
cccgggactcatctgcaggctc

SEQ ID NO: 1184 - RNA, 22 nt, synthetic construct
  source 1..22: mol_type = other RNA
cccgggaggagcggccctgcag

SEQ ID NO: 1185 - RNA, 22 nt, synthetic construct
  source 1..22: mol_type = other RNA
ccctccaaactggtgtcagagc

SEQ ID NO: 1186 - RNA, 22 nt, synthetic construct
  source 1..22: mol_type = other RNA
ccctgcaggaagcggatgatct

SEQ ID NO: 1187 - RNA, 22 nt, synthetic construct
  source 1..22: mol_type = other RNA
ccgctcctcccgggactcatct

SEQ ID NO: 1188 - RNA, 22 nt, synthetic construct
  source 1..22: mol_type = other RNA
ccgcttcctgcagggccgctcc

SEQ ID NO: 1189 - RNA, 22 nt, synthetic construct
  source 1..22: mol_type = other RNA
ccgggactcatctgcaggctct

SEQ ID NO: 1190 - RNA, 22 nt, synthetic construct
  source 1..22: mol_type = other RNA
ccgggaggagcggccctgcagg

SEQ ID NO: 1191 - RNA, 22 nt, synthetic construct
  source 1..22: mol_type = other RNA
cctccaaactggtgtcagagcc

SEQ ID NO: 1192 - RNA, 22 nt, synthetic construct
  source 1..22: mol_type = other RNA
cctcccgggactcatctgcagg

SEQ ID NO: 1193 - RNA, 22 nt, synthetic construct
  source 1..22: mol_type = other RNA
cctgcagatgagtcccgggagg

SEQ ID NO: 1194 - RNA, 22 nt, synthetic construct
  source 1..22: mol_type = other RNA
cctgcaggaagcggatgatctt

SEQ ID NO: 1195 - RNA, 22 nt, synthetic construct
  source 1..22: mol_type = other RNA
cctgcagggccgctcctcccgg

SEQ ID NO: 1196 - RNA, 22 nt, synthetic construct
  source 1..22: mol_type = other RNA
cgaataccaggaggccaccatt

SEQ ID NO: 1197 - RNA, 22 nt, synthetic construct
  source 1..22: mol_type = other RNA
cgctcctcccgggactcatctg

SEQ ID NO: 1198 - RNA, 22 nt, synthetic construct
  source 1..22: mol_type = other RNA
cgcttcctgcagggccgctcct

SEQ ID NO: 1199 - RNA, 22 nt, synthetic construct
  source 1..22: mol_type = other RNA
cggatgatcttctcaatggtgg

SEQ ID NO: 1200 - RNA, 22 nt, synthetic construct
  source 1..22: mol_type = other RNA
cggccctgcaggaagcggatga

SEQ ID NO: 1201 - RNA, 22 nt, synthetic construct
  source 1..22: mol_type = other RNA
cgggactcatctgcaggctctg

SEQ ID NO: 1202 - RNA, 22 nt, synthetic construct
  source 1..22: mol_type = other RNA
cgggaggagcggccctgcagga

SEQ ID NO: 1203 - RNA, 22 nt, synthetic construct
  source 1..22: mol_type = other RNA
ctcaatggtggcctcctggtat

SEQ ID NO: 1204 - RNA, 22 nt, synthetic construct
  source 1..22: mol_type = other RNA
ctcatctgcaggctctgacacc

SEQ ID NO: 1205 - RNA, 22 nt, synthetic construct
  source 1..22: mol_type = other RNA
ctccaaactggtgtcagagcct

SEQ ID NO: 1206 - RNA, 22 nt, synthetic construct
  source 1..22: mol_type = other RNA
ctcccgggactcatctgcaggc

SEQ ID NO: 1207 - RNA, 22 nt, synthetic construct
  source 1..22: mol_type = other RNA
ctcctcccgggactcatctgca

SEQ ID NO: 1208 - RNA, 22 nt, synthetic construct
  source 1..22: mol_type = other RNA
ctctgacaccagtttggagggt

SEQ ID NO: 1209 - RNA, 22 nt, synthetic construct
  source 1..22: mol_type = other RNA
ctgacaccagtttggagggtgc

SEQ ID NO: 1210 - RNA, 22 nt, synthetic construct
  source 1..22: mol_type = other RNA
ctgcacccatgggtccaaccta

SEQ ID NO: 1211 - RNA, 22 nt, synthetic construct
  source 1..22: mol_type = other RNA
ctgcagatgagtcccgggagga

SEQ ID NO: 1212 - RNA, 22 nt, synthetic construct
  source 1..22: mol_type = other RNA
ctgcaggaagcggatgatcttc

SEQ ID NO: 1213 - RNA, 22 nt, synthetic construct
  source 1..22: mol_type = other RNA
ctgcaggctctgacaccagttt

SEQ ID NO: 1214 - RNA, 22 nt, synthetic construct
  source 1..22: mol_type = other RNA
ctgcagggccgctcctcccggg

SEQ ID NO: 1215 - RNA, 22 nt, synthetic construct
  source 1..22: mol_type = other RNA
ctggggaactggggactggtta

SEQ ID NO: 1216 - RNA, 22 nt, synthetic construct
  source 1..22: mol_type = other RNA
ctggggactggttaggttggac

SEQ ID NO: 1217 - RNA, 22 nt, synthetic construct
  source 1..22: mol_type = other RNA
ctggtgtcagagcctgcagatg

SEQ ID NO: 1218 - RNA, 22 nt, synthetic construct
  source 1..22: mol_type = other RNA
ctggttaggttggacccatggg

SEQ ID NO: 1219 - RNA, 22 nt, synthetic construct
  source 1..22: mol_type = other RNA
cttcctgcagggccgctcctcc

SEQ ID NO: 1220 - RNA, 22 nt, synthetic construct
  source 1..22: mol_type = other RNA
cttctcaatggtggcctcctgg

SEQ ID NO: 1221 - RNA, 22 nt, synthetic construct
  source 1..22: mol_type = other RNA
gaactggggactggttaggttg

SEQ ID NO: 1222 - RNA, 22 nt, synthetic construct
  source 1..22: mol_type = other RNA
gaagatcatccgcttcctgcag

SEQ ID NO: 1223 - RNA, 22 nt, synthetic construct
  source 1..22: mol_type = other RNA
gaagcggatgatcttctcaatg

SEQ ID NO: 1224 - RNA, 22 nt, synthetic construct
  source 1..22: mol_type = other RNA
gaataccaggaggccaccattg

SEQ ID NO: 1225 - RNA, 22 nt, synthetic construct
  source 1..22: mol_type = other RNA
gacaccagtttggagggtgctg

SEQ ID NO: 1226 - RNA, 22 nt, synthetic construct
  source 1..22: mol_type = other RNA
gacccatgggtgcagcaccctc

SEQ ID NO: 1227 - RNA, 22 nt, synthetic construct
  source 1..22: mol_type = other RNA
gactcatctgcaggctctgaca

SEQ ID NO: 1228 - RNA, 22 nt, synthetic construct
  source 1..22: mol_type = other RNA
gactggttaggttggacccatg

SEQ ID NO: 1229 - RNA, 22 nt, synthetic construct
  source 1..22: mol_type = other RNA
gagaagatcatccgcttcctgc

SEQ ID NO: 1230 - RNA, 22 nt, synthetic construct
  source 1..22: mol_type = other RNA
gagcctgcagatgagtcccggg

SEQ ID NO: 1231 - RNA, 22 nt, synthetic construct
  source 1..22: mol_type = other RNA
gagcggccctgcaggaagcgga

SEQ ID NO: 1232 - RNA, 22 nt, synthetic construct
  source 1..22: mol_type = other RNA
gaggagcggccctgcaggaagc

SEQ ID NO: 1233 - RNA, 22 nt, synthetic construct
  source 1..22: mol_type = other RNA
gaggccaccattgagaagatca

SEQ ID NO: 1234 - RNA, 22 nt, synthetic construct
  source 1..22: mol_type = other RNA
gagggtgctgcacccatgggtc

SEQ ID NO: 1235 - RNA, 22 nt, synthetic construct
  source 1..22: mol_type = other RNA
gagtcccgggaggagcggccct

SEQ ID NO: 1236 - RNA, 22 nt, synthetic construct
  source 1..22: mol_type = other RNA
gatcatccgcttcctgcagggc

SEQ ID NO: 1237 - RNA, 22 nt, synthetic construct
  source 1..22: mol_type = other RNA
gatcttctcaatggtggcctcc

SEQ ID NO: 1238 - RNA, 22 nt, synthetic construct
  source 1..22: mol_type = other RNA
gatgagtcccgggaggagcggc

SEQ ID NO: 1239 - RNA, 22 nt, synthetic construct
  source 1..22: mol_type = other RNA
gatgatcttctcaatggtggcc

SEQ ID NO: 1240 - RNA, 22 nt, synthetic construct
  source 1..22: mol_type = other RNA
gcacccatgggtccaacctaac

SEQ ID NO: 1241 - RNA, 22 nt, synthetic construct
  source 1..22: mol_type = other RNA
gcaccctccaaactggtgtcag

SEQ ID NO: 1242 - RNA, 22 nt, synthetic construct
  source 1..22: mol_type = other RNA
gcagatgagtcccgggaggagc

SEQ ID NO: 1243 - RNA, 22 nt, synthetic construct
  source 1..22: mol_type = other RNA
gcagcaccctccaaactggtgt

SEQ ID NO: 1244 - RNA, 22 nt, synthetic construct
  source 1..22: mol_type = other RNA
gcaggaagcggatgatcttctc

SEQ ID NO: 1245 - RNA, 22 nt, synthetic construct
  source 1..22: mol_type = other RNA
gcaggctctgacaccagtttgg

SEQ ID NO: 1246 - RNA, 22 nt, synthetic construct
  source 1..22: mol_type = other RNA
gcagggccgctcctcccgggac

SEQ ID NO: 1247 - RNA, 22 nt, synthetic construct
  source 1..22: mol_type = other RNA
gccaccattgagaagatcatcc

SEQ ID NO: 1248 - RNA, 22 nt, synthetic construct
  source 1..22: mol_type = other RNA
gccctgcaggaagcggatgatc

SEQ ID NO: 1249 - RNA, 22 nt, synthetic construct
  source 1..22: mol_type = other RNA
gccgctcctcccgggactcatc

SEQ ID NO: 1250 - RNA, 22 nt, synthetic construct
  source 1..22: mol_type = other RNA
gcctgcagatgagtcccgggag

SEQ ID NO: 1251 - RNA, 22 nt, synthetic construct
  source 1..22: mol_type = other RNA
gcggatgatcttctcaatggtg

SEQ ID NO: 1252 - RNA, 22 nt, synthetic construct
  source 1..22: mol_type = other RNA
gcggccctgcaggaagcggatg

SEQ ID NO: 1253 - RNA, 22 nt, synthetic construct
  source 1..22: mol_type = other RNA
gctcctcccgggactcatctgc

SEQ ID NO: 1254 - RNA, 22 nt, synthetic construct
  source 1..22: mol_type = other RNA
gctctgacaccagtttggaggg

SEQ ID NO: 1255 - RNA, 22 nt, synthetic construct
  source 1..22: mol_type = other RNA
gctgcacccatgggtccaacct

SEQ ID NO: 1256 - RNA, 22 nt, synthetic construct
  source 1..22: mol_type = other RNA
gctggggaactggggactggtt

SEQ ID NO: 1257 - RNA, 22 nt, synthetic construct
  source 1..22: mol_type = other RNA
gcttcctgcagggccgctcctc

SEQ ID NO: 1258 - RNA, 22 nt, synthetic construct
  source 1..22: mol_type = other RNA
ggaactggggactggttaggtt

SEQ ID NO: 1259 - RNA, 22 nt, synthetic construct
  source 1..22: mol_type = other RNA
ggaagcggatgatcttctcaat

SEQ ID NO: 1260 - RNA, 22 nt, synthetic construct
  source 1..22: mol_type = other RNA
ggacccatgggtgcagcaccct

SEQ ID NO: 1261 - RNA, 22 nt, synthetic construct
  source 1..22: mol_type = other RNA
ggactcatctgcaggctctgac

SEQ ID NO: 1262 - RNA, 22 nt, synthetic construct
  source 1..22: mol_type = other RNA
ggactggttaggttggacccat

SEQ ID NO: 1263 - RNA, 22 nt, synthetic construct
  source 1..22: mol_type = other RNA
ggagcggccctgcaggaagcgg

SEQ ID NO: 1264 - RNA, 22 nt, synthetic construct
  source 1..22: mol_type = other RNA
ggaggagcggccctgcaggaag

SEQ ID NO: 1265 - RNA, 22 nt, synthetic construct
  source 1..22: mol_type = other RNA
ggaggccaccattgagaagatc

SEQ ID NO: 1266 - RNA, 22 nt, synthetic construct
  source 1..22: mol_type = other RNA
ggagggtgctgcacccatgggt

SEQ ID NO: 1267 - RNA, 22 nt, synthetic construct
  source 1..22: mol_type = other RNA
ggatgatcttctcaatggtggc

SEQ ID NO: 1268 - RNA, 22 nt, synthetic construct
  source 1..22: mol_type = other RNA
ggccaccattgagaagatcatc

SEQ ID NO: 1269 - RNA, 22 nt, synthetic construct
  source 1..22: mol_type = other RNA
ggccctgcaggaagcggatgat

SEQ ID NO: 1270 - RNA, 22 nt, synthetic construct
  source 1..22: mol_type = other RNA
ggccgctcctcccgggactcat

SEQ ID NO: 1271 - RNA, 22 nt, synthetic construct
  source 1..22: mol_type = other RNA
ggctctgacaccagtttggagg

SEQ ID NO: 1272 - RNA, 22 nt, synthetic construct
  source 1..22: mol_type = other RNA
ggctggggaactggggactggt

SEQ ID NO: 1273 - RNA, 22 nt, synthetic construct
  source 1..22: mol_type = other RNA
gggaactggggactggttaggt

SEQ ID NO: 1274 - RNA, 22 nt, synthetic construct
  source 1..22: mol_type = other RNA
gggactcatctgcaggctctga

SEQ ID NO: 1275 - RNA, 22 nt, synthetic construct
  source 1..22: mol_type = other RNA
gggactggttaggttggaccca

SEQ ID NO: 1276 - RNA, 22 nt, synthetic construct
  source 1..22: mol_type = other RNA
gggaggagcggccctgcaggaa

SEQ ID NO: 1277 - RNA, 22 nt, synthetic construct
  source 1..22: mol_type = other RNA
gggccgctcctcccgggactca

SEQ ID NO: 1278 - RNA, 22 nt, synthetic construct
  source 1..22: mol_type = other RNA
gggctggggaactggggactgg

SEQ ID NO: 1279 - RNA, 22 nt, synthetic construct
  source 1..22: mol_type = other RNA
ggggaactggggactggttagg

SEQ ID NO: 1280 - RNA, 22 nt, synthetic construct
  source 1..22: mol_type = other RNA
ggggactggttaggttggaccc

SEQ ID NO: 1281 - RNA, 22 nt, synthetic construct
  source 1..22: mol_type = other RNA
gggtccaacctaaccagtcccc

SEQ ID NO: 1282 - RNA, 22 nt, synthetic construct
  source 1..22: mol_type = other RNA
gggtgcagcaccctccaaactg

SEQ ID NO: 1283 - RNA, 22 nt, synthetic construct
  source 1..22: mol_type = other RNA
gggtgctgcacccatgggtcca

SEQ ID NO: 1284 - RNA, 22 nt, synthetic construct
  source 1..22: mol_type = other RNA
ggtccaacctaaccagtcccca

SEQ ID NO: 1285 - RNA, 22 nt, synthetic construct
  source 1..22: mol_type = other RNA
ggtcccacgaataccaggaggc

SEQ ID NO: 1286 - RNA, 22 nt, synthetic construct
  source 1..22: mol_type = other RNA
ggtgcagcaccctccaaactgg

SEQ ID NO: 1287 - RNA, 22 nt, synthetic construct
  source 1..22: mol_type = other RNA
ggtgctgcacccatgggtccaa

SEQ ID NO: 1288 - RNA, 22 nt, synthetic construct
  source 1..22: mol_type = other RNA
ggtgtcagagcctgcagatgag

SEQ ID NO: 1289 - RNA, 22 nt, synthetic construct
  source 1..22: mol_type = other RNA
ggttaggttggacccatgggtg

SEQ ID NO: 1290 - RNA, 22 nt, synthetic construct
  source 1..22: mol_type = other RNA
ggttggacccatgggtgcagca

SEQ ID NO: 1291 - RNA, 22 nt, synthetic construct
  source 1..22: mol_type = other RNA
gtcagagcctgcagatgagtcc

SEQ ID NO: 1292 - RNA, 22 nt, synthetic construct
  source 1..22: mol_type = other RNA
gtccaacctaaccagtccccag

SEQ ID NO: 1293 - RNA, 22 nt, synthetic construct
  source 1..22: mol_type = other RNA
gtcccacgaataccaggaggcc

SEQ ID NO: 1294 - RNA, 22 nt, synthetic construct
  source 1..22: mol_type = other RNA
gtcccgggaggagcggccctgc

SEQ ID NO: 1295 - RNA, 22 nt, synthetic construct
  source 1..22: mol_type = other RNA
gtgcagcaccctccaaactggt

SEQ ID NO: 1296 - RNA, 22 nt, synthetic construct
  source 1..22: mol_type = other RNA
gtgctgcacccatgggtccaac

SEQ ID NO: 1297 - RNA, 22 nt, synthetic construct
  source 1..22: mol_type = other RNA
gtggtcccacgaataccaggag

SEQ ID NO: 1298 - RNA, 22 nt, synthetic construct
  source 1..22: mol_type = other RNA
gtgtcagagcctgcagatgagt

SEQ ID NO: 1299 - RNA, 22 nt, synthetic construct
  source 1..22: mol_type = other RNA
gttaggttggacccatgggtgc

SEQ ID NO: 1300 - RNA, 22 nt, synthetic construct
  source 1..22: mol_type = other RNA
gttggacccatgggtgcagcac

SEQ ID NO: 1301 - RNA, 22 nt, synthetic construct
  source 1..22: mol_type = other RNA
gtttggagggtgctgcacccat

SEQ ID NO: 1302 - RNA, 22 nt, synthetic construct
  source 1..22: mol_type = other RNA
taccaggaggccaccattgaga

SEQ ID NO: 1303 - RNA, 22 nt, synthetic construct
  source 1..22: mol_type = other RNA
taggttggacccatgggtgcag

SEQ ID NO: 1304 - RNA, 22 nt, synthetic construct
  source 1..22: mol_type = other RNA
tcaatggtggcctcctggtatt

SEQ ID NO: 1305 - RNA, 22 nt, synthetic construct
  source 1..22: mol_type = other RNA
tcagagcctgcagatgagtccc

SEQ ID NO: 1306 - RNA, 22 nt, synthetic construct
  source 1..22: mol_type = other RNA
tcatccgcttcctgcagggccg

SEQ ID NO: 1307 - RNA, 22 nt, synthetic construct
  source 1..22: mol_type = other RNA
tcatctgcaggctctgacacca

SEQ ID NO: 1308 - RNA, 22 nt, synthetic construct
  source 1..22: mol_type = other RNA
tccaaactggtgtcagagcctg

SEQ ID NO: 1309 - RNA, 22 nt, synthetic construct
  source 1..22: mol_type = other RNA
tccaacctaaccagtccccagt

SEQ ID NO: 1310 - RNA, 22 nt, synthetic construct
  source 1..22: mol_type = other RNA
tcccacgaataccaggaggcca

SEQ ID NO: 1311 - RNA, 22 nt, synthetic construct
  source 1..22: mol_type = other RNA
tcccgggactcatctgcaggct

SEQ ID NO: 1312 - RNA, 22 nt, synthetic construct
  source 1..22: mol_type = other RNA
tcccgggaggagcggccctgca

SEQ ID NO: 1313 - RNA, 22 nt, synthetic construct
  source 1..22: mol_type = other RNA
tccgcttcctgcagggccgctc

SEQ ID NO: 1314 - RNA, 22 nt, synthetic construct
  source 1..22: mol_type = other RNA
tcctcccgggactcatctgcag

SEQ ID NO: 1315 - RNA, 22 nt, synthetic construct
  source 1..22: mol_type = other RNA
tcctgcagggccgctcctcccg

SEQ ID NO: 1316 - RNA, 22 nt, synthetic construct
  source 1..22: mol_type = other RNA
tctcaatggtggcctcctggta

SEQ ID NO: 1317 - RNA, 22 nt, synthetic construct
  source 1..22: mol_type = other RNA
tctgacaccagtttggagggtg

SEQ ID NO: 1318 - RNA, 22 nt, synthetic construct
  source 1..22: mol_type = other RNA
tctgcaggctctgacaccagtt

SEQ ID NO: 1319 - RNA, 22 nt, synthetic construct
  source 1..22: mol_type = other RNA
tcttctcaatggtggcctcctg

SEQ ID NO: 1320 - RNA, 22 nt, synthetic construct
  source 1..22: mol_type = other RNA
tgacaccagtttggagggtgct

SEQ ID NO: 1321 - RNA, 22 nt, synthetic construct
  source 1..22: mol_type = other RNA
tgagaagatcatccgcttcctg

SEQ ID NO: 1322 - RNA, 22 nt, synthetic construct
  source 1..22: mol_type = other RNA
tgagtcccgggaggagcggccc

SEQ ID NO: 1323 - RNA, 22 nt, synthetic construct
  source 1..22: mol_type = other RNA
tgatcttctcaatggtggcctc

SEQ ID NO: 1324 - RNA, 22 nt, synthetic construct
  source 1..22: mol_type = other RNA
tgcacccatgggtccaacctaa

SEQ ID NO: 1325 - RNA, 22 nt, synthetic construct
  source 1..22: mol_type = other RNA
tgcagatgagtcccgggaggag

SEQ ID NO: 1326 - RNA, 22 nt, synthetic construct
  source 1..22: mol_type = other RNA
tgcagcaccctccaaactggtg

SEQ ID NO: 1327 - RNA, 22 nt, synthetic construct
  source 1..22: mol_type = other RNA
tgcaggaagcggatgatcttct

SEQ ID NO: 1328 - RNA, 22 nt, synthetic construct
  source 1..22: mol_type = other RNA
tgcaggctctgacaccagtttg

SEQ ID NO: 1329 - RNA, 22 nt, synthetic construct
  source 1..22: mol_type = other RNA
tgcagggccgctcctcccggga

SEQ ID NO: 1330 - RNA, 22 nt, synthetic construct
  source 1..22: mol_type = other RNA
tgctgcacccatgggtccaacc

SEQ ID NO: 1331 - RNA, 22 nt, synthetic construct
  source 1..22: mol_type = other RNA
tggacccatgggtgcagcaccc

SEQ ID NO: 1332 - RNA, 22 nt, synthetic construct
  source 1..22: mol_type = other RNA
tggagggtgctgcacccatggg

SEQ ID NO: 1333 - RNA, 22 nt, synthetic construct
  source 1..22: mol_type = other RNA
tggggaactggggactggttag

SEQ ID NO: 1334 - RNA, 22 nt, synthetic construct
  source 1..22: mol_type = other RNA
tggggactggttaggttggacc

SEQ ID NO: 1335 - RNA, 22 nt, synthetic construct
  source 1..22: mol_type = other RNA
tgggtccaacctaaccagtccc

SEQ ID NO: 1336 - RNA, 22 nt, synthetic construct
  source 1..22: mol_type = other RNA
tgggtgcagcaccctccaaact

SEQ ID NO: 1337 - RNA, 22 nt, synthetic construct
  source 1..22: mol_type = other RNA
tggtcccacgaataccaggagg

SEQ ID NO: 1338 - RNA, 22 nt, synthetic construct
  source 1..22: mol_type = other RNA
tggtgtcagagcctgcagatga

SEQ ID NO: 1339 - RNA, 22 nt, synthetic construct
  source 1..22: mol_type = other RNA
tggttaggttggacccatgggt

SEQ ID NO: 1340 - RNA, 22 nt, synthetic construct
  source 1..22: mol_type = other RNA
tgtcagagcctgcagatgagtc

SEQ ID NO: 1341 - RNA, 22 nt, synthetic construct
  source 1..22: mol_type = other RNA
ttaggttggacccatgggtgca

SEQ ID NO: 1342 - RNA, 22 nt, synthetic construct
  source 1..22: mol_type = other RNA
ttcctgcagggccgctcctccc

SEQ ID NO: 1343 - RNA, 22 nt, synthetic construct
  source 1..22: mol_type = other RNA
ttctcaatggtggcctcctggt

SEQ ID NO: 1344 - RNA, 22 nt, synthetic construct
  source 1..22: mol_type = other RNA
ttgagaagatcatccgcttcct

SEQ ID NO: 1345 - RNA, 22 nt, synthetic construct
  source 1..22: mol_type = other RNA
ttggacccatgggtgcagcacc

SEQ ID NO: 1346 - RNA, 22 nt, synthetic construct
  source 1..22: mol_type = other RNA
ttggagggtgctgcacccatgg

SEQ ID NO: 1347 - RNA, 22 nt, synthetic construct
  source 1..22: mol_type = other RNA
tttggagggtgctgcacccatg

SEQ ID NO: 1348 - RNA, 20 nt, synthetic construct
  source 1..20: mol_type = other RNA
aacagcaggtcgaggccgcc

SEQ ID NO: 1349 - RNA, 20 nt, synthetic construct
  source 1..20: mol_type = other RNA
aaccccggcctggcgcgctc

SEQ ID NO: 1350 - RNA, 20 nt, synthetic construct
  source 1..20: mol_type = other RNA
aaccggtgagcgcgccaggc

SEQ ID NO: 1351 - RNA, 20 nt, synthetic construct
  source 1..20: mol_type = other RNA
aactccggcgcctgcagcag

SEQ ID NO: 1352 - RNA, 20 nt, synthetic construct
  source 1..20: mol_type = other RNA
aagaagcgacacagcttgta

SEQ ID NO: 1353 - RNA, 20 nt, synthetic construct
  source 1..20: mol_type = other RNA
aagacctcggccaggccggc

SEQ ID NO: 1354 - RNA, 20 nt, synthetic construct
  source 1..20: mol_type = other RNA
aagcagcgtcaggaccatgg

SEQ ID NO: 1355 - RNA, 20 nt, synthetic construct
  source 1..20: mol_type = other RNA
aagcaggcgggcggcgcgcg

SEQ ID NO: 1356 - RNA, 20 nt, synthetic construct
  source 1..20: mol_type = other RNA
aagcgacacagcttgtaggc

SEQ ID NO: 1357 - RNA, 20 nt, synthetic construct
  source 1..20: mol_type = other RNA
aagctgtgtcgcttcttcgc

SEQ ID NO: 1358 - RNA, 20 nt, synthetic construct
  source 1..20: mol_type = other RNA
aaggcctgctgcagctccgg

SEQ ID NO: 1359 - RNA, 20 nt, synthetic construct
  source 1..20: mol_type = other RNA
aagtgtcgccgggggcaggc

SEQ ID NO: 1360 - RNA, 20 nt, synthetic construct
  source 1..20: mol_type = other RNA
acaagctgtgtcgcttcttc

SEQ ID NO: 1361 - RNA, 20 nt, synthetic construct
  source 1..20: mol_type = other RNA
acaaggcctgctgcagctcc

SEQ ID NO: 1362 - RNA, 20 nt, synthetic construct
  source 1..20: mol_type = other RNA
acacagcttgtaggcggaga

SEQ ID NO: 1363 - RNA, 20 nt, synthetic construct
  source 1..20: mol_type = other RNA
acacgcgtctccaactccgg

SEQ ID NO: 1364 - RNA, 20 nt, synthetic construct
  source 1..20: mol_type = other RNA
acagaccctgggctacctcg

SEQ ID NO: 1365 - RNA, 20 nt, synthetic construct
  source 1..20: mol_type = other RNA
acagcaggtcgaggccgcca

SEQ ID NO: 1366 - RNA, 20 nt, synthetic construct
  source 1..20: mol_type = other RNA
acagcttgtaggcggagaga

SEQ ID NO: 1367 - RNA, 20 nt, synthetic construct
  source 1..20: mol_type = other RNA
acatggcgaagaagcgacac

SEQ ID NO: 1368 - RNA, 20 nt, synthetic construct
  source 1..20: mol_type = other RNA
accaggatctgctccagcag

SEQ ID NO: 1369 - RNA, 20 nt, synthetic construct
  source 1..20: mol_type = other RNA
accagttggaagacctcggc

SEQ ID NO: 1370 - RNA, 20 nt, synthetic construct
  source 1..20: mol_type = other RNA
accatgggcccgtgccaccg

SEQ ID NO: 1371 - RNA, 20 nt, synthetic construct
  source 1..20: mol_type = other RNA
accatgggcgcggggccgcg

SEQ ID NO: 1372 - RNA, 20 nt, synthetic construct
  source 1..20: mol_type = other RNA
accccggcctggcgcgctca

SEQ ID NO: 1373 - RNA, 20 nt, synthetic construct
  source 1..20: mol_type = other RNA
accctgggctacctcgcggc

SEQ ID NO: 1374 - RNA, 20 nt, synthetic construct
  source 1..20: mol_type = other RNA
accgaggtgcaggacgccct

SEQ ID NO: 1375 - RNA, 20 nt, synthetic construct
  source 1..20: mol_type = other RNA
accgccagccgctcggcgcc

SEQ ID NO: 1376 - RNA, 20 nt, synthetic construct
  source 1..20: mol_type = other RNA
accgcccccatctggcccag

SEQ ID NO: 1377 - RNA, 20 nt, synthetic construct
  source 1..20: mol_type = other RNA
accggtgagcgcgccaggcc

SEQ ID NO: 1378 - RNA, 20 nt, synthetic construct
  source 1..20: mol_type = other RNA
accggttctcagccaccagg

SEQ ID NO: 1379 - RNA, 20 nt, synthetic construct
  source 1..20: mol_type = other RNA
acctcggccaggccggcgcc

SEQ ID NO: 1380 - RNA, 20 nt, synthetic construct
  source 1..20: mol_type = other RNA
acctcggtgcctgcccccgg

SEQ ID NO: 1381 - RNA, 20 nt, synthetic construct
  source 1..20: mol_type = other RNA
acctgctgttgcggctgctg

SEQ ID NO: 1382 - RNA, 20 nt, synthetic construct
  source 1..20: mol_type = other RNA
acgccatccgcctcgatggc

SEQ ID NO: 1383 - RNA, 20 nt, synthetic construct
  source 1..20: mol_type = other RNA
acgccctggagcgcgcgctg

SEQ ID NO: 1384 - RNA, 20 nt, synthetic construct
  source 1..20: mol_type = other RNA
acgcgtctccaactccggcg

SEQ ID NO: 1385 - RNA, 20 nt, synthetic construct
  source 1..20: mol_type = other RNA
acgcgtgtgcaggccgcgcg

SEQ ID NO: 1386 - RNA, 20 nt, synthetic construct
  source 1..20: mol_type = other RNA
acgctgcttctctccgccta

SEQ ID NO: 1387 - RNA, 20 nt, synthetic construct
  source 1..20: mol_type = other RNA
acggcccgcgcgccgcccgc

SEQ ID NO: 1388 - RNA, 20 nt, synthetic construct
  source 1..20: mol_type = other RNA
acggccgggcgccgagcggc

SEQ ID NO: 1389 - RNA, 20 nt, synthetic construct
  source 1..20: mol_type = other RNA
actccggcgcctgcagcagc

SEQ ID NO: 1390 - RNA, 20 nt, synthetic construct
  source 1..20: mol_type = other RNA
agaaccggtgagcgcgccag

SEQ ID NO: 1391 - RNA, 20 nt, synthetic construct
  source 1..20: mol_type = other RNA
agaagcagcgtcaggaccat

SEQ ID NO: 1392 - RNA, 20 nt, synthetic construct
  source 1..20: mol_type = other RNA
agaagcgacacagcttgtag

SEQ ID NO: 1393 - RNA, 20 nt, synthetic construct
  source 1..20: mol_type = other RNA
agaccctgggctacctcgcg

SEQ ID NO: 1394 - RNA, 20 nt, synthetic construct
  source 1..20: mol_type = other RNA
agacctcggccaggccggcg

SEQ ID NO: 1395 - RNA, 20 nt, synthetic construct
  source 1..20: mol_type = other RNA
agacgcgtgtgcaggccgcg

SEQ ID NO: 1396 - RNA, 20 nt, synthetic construct
  source 1..20: mol_type = other RNA
agagaagcagcgtcaggacc

SEQ ID NO: 1397 - RNA, 20 nt, synthetic construct
  source 1..20: mol_type = other RNA
agatcctggtggctgagaac

SEQ ID NO: 1398 - RNA, 20 nt, synthetic construct
  source 1..20: mol_type = other RNA
agatgggggcggtggcacgg

SEQ ID NO: 1399 - RNA, 20 nt, synthetic construct
  source 1..20: mol_type = other RNA
agcagatcctggtggctgag

SEQ ID NO: 1400 - RNA, 20 nt, synthetic construct
  source 1..20: mol_type = other RNA
agcagccaggcctcctccac

SEQ ID NO: 1401 - RNA, 20 nt, synthetic construct
  source 1..20: mol_type = other RNA
agcagccgcaacagcaggtc

SEQ ID NO: 1402 - RNA, 20 nt, synthetic construct
  source 1..20: mol_type = other RNA
agcagcgtcaggaccatggg

SEQ ID NO: 1403 - RNA, 20 nt, synthetic construct
  source 1..20: mol_type = other RNA
agcaggccttgtccgcgctg

SEQ ID NO: 1404 - RNA, 20 nt, synthetic construct
  source 1..20: mol_type = other RNA
agcaggcgcgcggcctgcac

SEQ ID NO: 1405 - RNA, 20 nt, synthetic construct
  source 1..20: mol_type = other RNA
agcaggcgggcggcgcgcgg

SEQ ID NO: 1406 - RNA, 20 nt, synthetic construct
  source 1..20: mol_type = other RNA
agcaggtcgaggccgccatc

SEQ ID NO: 1407 - RNA, 20 nt, synthetic construct
  source 1..20: mol_type = other RNA
agccaccaggatctgctcca

SEQ ID NO: 1408 - RNA, 20 nt, synthetic construct
  source 1..20: mol_type = other RNA
agccaggcctcctccaccag

SEQ ID NO: 1409 - RNA, 20 nt, synthetic construct
  source 1..20: mol_type = other RNA
agcccaccatgggcccgtgc

SEQ ID NO: 1410 - RNA, 20 nt, synthetic construct
  source 1..20: mol_type = other RNA
agcccagggtctgtgcgacg

SEQ ID NO: 1411 - RNA, 20 nt, synthetic construct
  source 1..20: mol_type = other RNA
agccgcaacagcaggtcgag

SEQ ID NO: 1412 - RNA, 20 nt, synthetic construct
  source 1..20: mol_type = other RNA
agccgctcggcgcccggccg

SEQ ID NO: 1413 - RNA, 20 nt, synthetic construct
  source 1..20: mol_type = other RNA
agcgacacagcttgtaggcg

SEQ ID NO: 1414 - RNA, 20 nt, synthetic construct
  source 1..20: mol_type = other RNA
agcgcgcgctccagggcgtc

SEQ ID NO: 1415 - RNA, 20 nt, synthetic construct
  source 1..20: mol_type = other RNA
agcgcgcgctgccggagctg

SEQ ID NO: 1416 - RNA, 20 nt, synthetic construct
  source 1..20: mol_type = other RNA
agcgcggacaaggcctgctg

SEQ ID NO: 1417 - RNA, 20 nt, synthetic construct
  source 1..20: mol_type = other RNA
agcggctggcggtgcctggg

SEQ ID NO: 1418 - RNA, 20 nt, synthetic construct
  source 1..20: mol_type = other RNA
agcgtcaggaccatgggcgc

SEQ ID NO: 1419 - RNA, 20 nt, synthetic construct
  source 1..20: mol_type = other RNA
agctccggcagcgcgcgctc

SEQ ID NO: 1420 - RNA, 20 nt, synthetic construct
  source 1..20: mol_type = other RNA
agctgcagcaggccttgtcc

SEQ ID NO: 1421 - RNA, 20 nt, synthetic construct
  source 1..20: mol_type = other RNA
agctgtgtcgcttcttcgcc

SEQ ID NO: 1422 - RNA, 20 nt, synthetic construct
  source 1..20: mol_type = other RNA
agcttgtaggcggagagaag

SEQ ID NO: 1423 - RNA, 20 nt, synthetic construct
  source 1..20: mol_type = other RNA
aggaccatgggcgcggggcc

SEQ ID NO: 1424 - RNA, 20 nt, synthetic construct
  source 1..20: mol_type = other RNA
aggacgccctggagcgcgcg

SEQ ID NO: 1425 - RNA, 20 nt, synthetic construct
  source 1..20: mol_type = other RNA
aggatctgctccagcaggcg

SEQ ID NO: 1426 - RNA, 20 nt, synthetic construct
  source 1..20: mol_type = other RNA
aggcaccgaggtgcaggacg

SEQ ID NO: 1427 - RNA, 20 nt, synthetic construct
  source 1..20: mol_type = other RNA
aggcaccgccagccgctcgg

SEQ ID NO: 1428 - RNA, 20 nt, synthetic construct
  source 1..20: mol_type = other RNA
aggccgccatcgaggcggat

SEQ ID NO: 1429 - RNA, 20 nt, synthetic construct
  source 1..20: mol_type = other RNA
aggccgcgcgcctgctggag

SEQ ID NO: 1430 - RNA, 20 nt, synthetic construct
  source 1..20: mol_type = other RNA
aggccggcgcccacggcccg

SEQ ID NO: 1431 - RNA, 20 nt, synthetic construct
  source 1..20: mol_type = other RNA
aggcctcctccaccagttgg

SEQ ID NO: 1432 - RNA, 20 nt, synthetic construct
  source 1..20: mol_type = other RNA
aggcctgctgcagctccggc

SEQ ID NO: 1433 - RNA, 20 nt, synthetic construct
  source 1..20: mol_type = other RNA
aggccttgtccgcgctgaag

SEQ ID NO: 1434 - RNA, 20 nt, synthetic construct
  source 1..20: mol_type = other RNA
aggcgccggagttggagacg

SEQ ID NO: 1435 - RNA, 20 nt, synthetic construct
  source 1..20: mol_type = other RNA
aggcgcgcggcctgcacacg

SEQ ID NO: 1436 - RNA, 20 nt, synthetic construct
  source 1..20: mol_type = other RNA
aggcggagagaagcagcgtc

SEQ ID NO: 1437 - RNA, 20 nt, synthetic construct
  source 1..20: mol_type = other RNA
aggcggatggcgtcgcacag

SEQ ID NO: 1438 - RNA, 20 nt, synthetic construct
  source 1..20: mol_type = other RNA
aggcgggcggcgcgcgggcc

SEQ ID NO: 1439 - RNA, 20 nt, synthetic construct
  source 1..20: mol_type = other RNA
agggcgtcctgcacctcggt

SEQ ID NO: 1440 - RNA, 20 nt, synthetic construct
  source 1..20: mol_type = other RNA
agggtctgtgcgacgccatc

SEQ ID NO: 1441 - RNA, 20 nt, synthetic construct
  source 1..20: mol_type = other RNA
aggtagcccagggtctgtgc

SEQ ID NO: 1442 - RNA, 20 nt, synthetic construct
  source 1..20: mol_type = other RNA
aggtcgaggccgccatcgag

SEQ ID NO: 1443 - RNA, 20 nt, synthetic construct
  source 1..20: mol_type = other RNA
aggtcttccaactggtggag

SEQ ID NO: 1444 - RNA, 20 nt, synthetic construct
  source 1..20: mol_type = other RNA
aggtgcaggacgccctggag

SEQ ID NO: 1445 - RNA, 20 nt, synthetic construct
  source 1..20: mol_type = other RNA
agtgtcgccgggggcaggca

SEQ ID NO: 1446 - RNA, 20 nt, synthetic construct
  source 1..20: mol_type = other RNA
agttggaagacctcggccag

SEQ ID NO: 1447 - RNA, 20 nt, synthetic construct
  source 1..20: mol_type = other RNA
agttggagacgcgtgtgcag

SEQ ID NO: 1448 - RNA, 20 nt, synthetic construct
  source 1..20: mol_type = other RNA
atccgcctcgatggcggcct

SEQ ID NO: 1449 - RNA, 20 nt, synthetic construct
  source 1..20: mol_type = other RNA
atcctggtggctgagaaccg

SEQ ID NO: 1450 - RNA, 20 nt, synthetic construct
  source 1..20: mol_type = other RNA
atcgaggcggatggcgtcgc

SEQ ID NO: 1451 - RNA, 20 nt, synthetic construct
  source 1..20: mol_type = other RNA
atctgctccagcaggcgcgc

SEQ ID NO: 1452 - RNA, 20 nt, synthetic construct
  source 1..20: mol_type = other RNA
atctggcccaggcaccgcca

SEQ ID NO: 1453 - RNA, 20 nt, synthetic construct
  source 1..20: mol_type = other RNA
atggcgaagaagcgacacag

SEQ ID NO: 1454 - RNA, 20 nt, synthetic construct
  source 1..20: mol_type = other RNA
atggcggcctcgacctgctg

SEQ ID NO: 1455 - RNA, 20 nt, synthetic construct
  source 1..20: mol_type = other RNA
atggcgtcgcacagaccctg

SEQ ID NO: 1456 - RNA, 20 nt, synthetic construct
  source 1..20: mol_type = other RNA
atgggcccgtgccaccgccc

SEQ ID NO: 1457 - RNA, 20 nt, synthetic construct
  source 1..20: mol_type = other RNA
atgggggcggtggcacgggc

SEQ ID NO: 1458 - RNA, 20 nt, synthetic construct
  source 1..20: mol_type = other RNA
atggtcctgacgctgcttct

SEQ ID NO: 1459 - RNA, 20 nt, synthetic construct
  source 1..20: mol_type = other RNA
atgtcccccgcggccccgcg

SEQ ID NO: 1460 - RNA, 20 nt, synthetic construct
  source 1..20: mol_type = other RNA
atgtcgggcccacggccggg

SEQ ID NO: 1461 - RNA, 20 nt, synthetic construct
  source 1..20: mol_type = other RNA
caacagcaggtcgaggccgc

SEQ ID NO: 1462 - RNA, 20 nt, synthetic construct
  source 1..20: mol_type = other RNA
caaccccggcctggcgcgct

SEQ ID NO: 1463 - RNA, 20 nt, synthetic construct
  source 1..20: mol_type = other RNA
caactccggcgcctgcagca

SEQ ID NO: 1464 - RNA, 20 nt, synthetic construct
  source 1..20: mol_type = other RNA
caactggtggaggaggcctg

SEQ ID NO: 1465 - RNA, 20 nt, synthetic construct
  source 1..20: mol_type = other RNA
caagctgtgtcgcttcttcg

SEQ ID NO: 1466 - RNA, 20 nt, synthetic construct
  source 1..20: mol_type = other RNA
caaggcctgctgcagctccg

SEQ ID NO: 1467 - RNA, 20 nt, synthetic construct
  source 1..20: mol_type = other RNA
cacacgcgtctccaactccg

SEQ ID NO: 1468 - RNA, 20 nt, synthetic construct
  source 1..20: mol_type = other RNA
cacagaccctgggctacctc

SEQ ID NO: 1469 - RNA, 20 nt, synthetic construct
  source 1..20: mol_type = other RNA
cacagcttgtaggcggagag

SEQ ID NO: 1470 - RNA, 20 nt, synthetic construct
  source 1..20: mol_type = other RNA
caccaggatctgctccagca

SEQ ID NO: 1471 - RNA, 20 nt, synthetic construct
  source 1..20: mol_type = other RNA
caccagttggaagacctcgg

SEQ ID NO: 1472 - RNA, 20 nt, synthetic construct
  source 1..20: mol_type = other RNA
caccatgggcccgtgccacc

SEQ ID NO: 1473 - RNA, 20 nt, synthetic construct
  source 1..20: mol_type = other RNA
caccgaggtgcaggacgccc

SEQ ID NO: 1474 - RNA, 20 nt, synthetic construct
  source 1..20: mol_type = other RNA
caccgccagccgctcggcgc

SEQ ID NO: 1475 - RNA, 20 nt, synthetic construct
  source 1..20: mol_type = other RNA
caccgcccccatctggccca

SEQ ID NO: 1476 - RNA, 20 nt, synthetic construct
  source 1..20: mol_type = other RNA
caccggttctcagccaccag

SEQ ID NO: 1477 - RNA, 20 nt, synthetic construct
  source 1..20: mol_type = other RNA
cacctcggtgcctgcccccg

SEQ ID NO: 1478 - RNA, 20 nt, synthetic construct
  source 1..20: mol_type = other RNA
cacgcgtctccaactccggc

SEQ ID NO: 1479 - RNA, 20 nt, synthetic construct
  source 1..20: mol_type = other RNA
cacggcccgcgcgccgcccg

SEQ ID NO: 1480 - RNA, 20 nt, synthetic construct
  source 1..20: mol_type = other RNA
cacggccgggcgccgagcgg

SEQ ID NO: 1481 - RNA, 20 nt, synthetic construct
  source 1..20: mol_type = other RNA
cagaccctgggctacctcgc

SEQ ID NO: 1482 - RNA, 20 nt, synthetic construct
  source 1..20: mol_type = other RNA
cagatcctggtggctgagaa

SEQ ID NO: 1483 - RNA, 20 nt, synthetic construct
  source 1..20: mol_type = other RNA
cagatgggggcggtggcacg

SEQ ID NO: 1484 - RNA, 20 nt, synthetic construct
  source 1..20: mol_type = other RNA
cagcagccaggcctcctcca

SEQ ID NO: 1485 - RNA, 20 nt, synthetic construct
  source 1..20: mol_type = other RNA
cagcagccgcaacagcaggt

SEQ ID NO: 1486 - RNA, 20 nt, synthetic construct
  source 1..20: mol_type = other RNA
cagcaggccttgtccgcgct

SEQ ID NO: 1487 - RNA, 20 nt, synthetic construct
  source 1..20: mol_type = other RNA
cagcaggcgcgcggcctgca

SEQ ID NO: 1488 - RNA, 20 nt, synthetic construct
  source 1..20: mol_type = other RNA
cagcaggtcgaggccgccat

SEQ ID NO: 1489 - RNA, 20 nt, synthetic construct
  source 1..20: mol_type = other RNA
cagccaccaggatctgctcc

SEQ ID NO: 1490 - RNA, 20 nt, synthetic construct
  source 1..20: mol_type = other RNA
cagccaggcctcctccacca

SEQ ID NO: 1491 - RNA, 20 nt, synthetic construct
  source 1..20: mol_type = other RNA
cagccgcaacagcaggtcga

SEQ ID NO: 1492 - RNA, 20 nt, synthetic construct
  source 1..20: mol_type = other RNA
cagccgctcggcgcccggcc

SEQ ID NO: 1493 - RNA, 20 nt, synthetic construct
  source 1..20: mol_type = other RNA
cagcgcgcgctccagggcgt

SEQ ID NO: 1494 - RNA, 20 nt, synthetic construct
  source 1..20: mol_type = other RNA
cagcgcggacaaggcctgct

SEQ ID NO: 1495 - RNA, 20 nt, synthetic construct
  source 1..20: mol_type = other RNA
cagcgtcaggaccatgggcg

SEQ ID NO: 1496 - RNA, 20 nt, synthetic construct
  source 1..20: mol_type = other RNA
cagctccggcagcgcgcgct

SEQ ID NO: 1497 - RNA, 20 nt, synthetic construct
  source 1..20: mol_type = other RNA
cagcttgtaggcggagagaa

SEQ ID NO: 1498 - RNA, 20 nt, synthetic construct
  source 1..20: mol_type = other RNA
caggaccatgggcgcggggc

SEQ ID NO: 1499 - RNA, 20 nt, synthetic construct
  source 1..20: mol_type = other RNA
caggacgccctggagcgcgc

SEQ ID NO: 1500 - RNA, 20 nt, synthetic construct
  source 1..20: mol_type = other RNA
caggatctgctccagcaggc

SEQ ID NO: 1501 - RNA, 20 nt, synthetic construct
  source 1..20: mol_type = other RNA
caggcaccgaggtgcaggac

SEQ ID NO: 1502 - RNA, 20 nt, synthetic construct
  source 1..20: mol_type = other RNA
caggcaccgccagccgctcg

SEQ ID NO: 1503 - RNA, 20 nt, synthetic construct
  source 1..20: mol_type = other RNA
caggccgcgcgcctgctgga

SEQ ID NO: 1504 - RNA, 20 nt, synthetic construct
  source 1..20: mol_type = other RNA
caggccggcgcccacggccc

SEQ ID NO: 1505 - RNA, 20 nt, synthetic construct
  source 1..20: mol_type = other RNA
caggcctcctccaccagttg

SEQ ID NO: 1506 - RNA, 20 nt, synthetic construct
  source 1..20: mol_type = other RNA
caggccttgtccgcgctgaa

SEQ ID NO: 1507 - RNA, 20 nt, synthetic construct
  source 1..20: mol_type = other RNA
caggcgccggagttggagac

SEQ ID NO: 1508 - RNA, 20 nt, synthetic construct
  source 1..20: mol_type = other RNA
caggcgcgcggcctgcacac

SEQ ID NO: 1509 - RNA, 20 nt, synthetic construct
  source 1..20: mol_type = other RNA
caggcgggcggcgcgcgggc

SEQ ID NO: 1510 - RNA, 20 nt, synthetic construct
  source 1..20: mol_type = other RNA
cagggcgtcctgcacctcgg

SEQ ID NO: 1511 - RNA, 20 nt, synthetic construct
  source 1..20: mol_type = other RNA
cagggtctgtgcgacgccat

SEQ ID NO: 1512 - RNA, 20 nt, synthetic construct
  source 1..20: mol_type = other RNA
caggtcgaggccgccatcga

SEQ ID NO: 1513 - RNA, 20 nt, synthetic construct
  source 1..20: mol_type = other RNA
cagttggaagacctcggcca

SEQ ID NO: 1514 - RNA, 20 nt, synthetic construct
  source 1..20: mol_type = other RNA
catccgcctcgatggcggcc

SEQ ID NO: 1515 - RNA, 20 nt, synthetic construct
  source 1..20: mol_type = other RNA
catcgaggcggatggcgtcg

SEQ ID NO: 1516 - RNA, 20 nt, synthetic construct
  source 1..20: mol_type = other RNA
catctggcccaggcaccgcc

SEQ ID NO: 1517 - RNA, 20 nt, synthetic construct
  source 1..20: mol_type = other RNA
catggcgaagaagcgacaca

SEQ ID NO: 1518 - RNA, 20 nt, synthetic construct
  source 1..20: mol_type = other RNA
catgggcccgtgccaccgcc

SEQ ID NO: 1519 - RNA, 20 nt, synthetic construct
  source 1..20: mol_type = other RNA
catggtcctgacgctgcttc

SEQ ID NO: 1520 - RNA, 20 nt, synthetic construct
  source 1..20: mol_type = other RNA
catgtcgggcccacggccgg

SEQ ID NO: 1521 - RNA, 20 nt, synthetic construct
  source 1..20: mol_type = other RNA
ccaaccccggcctggcgcgc

SEQ ID NO: 1522 - RNA, 20 nt, synthetic construct
  source 1..20: mol_type = other RNA
ccaactccggcgcctgcagc

SEQ ID NO: 1523 - RNA, 20 nt, synthetic construct
  source 1..20: mol_type = other RNA
ccaactggtggaggaggcct

SEQ ID NO: 1524 - RNA, 20 nt, synthetic construct
  source 1..20: mol_type = other RNA
ccaccaggatctgctccagc

SEQ ID NO: 1525 - RNA, 20 nt, synthetic construct
  source 1..20: mol_type = other RNA
ccaccagttggaagacctcg

SEQ ID NO: 1526 - RNA, 20 nt, synthetic construct
  source 1..20: mol_type = other RNA
ccaccatgggcccgtgccac

SEQ ID NO: 1527 - RNA, 20 nt, synthetic construct
  source 1..20: mol_type = other RNA
ccaccgcccccatctggccc

SEQ ID NO: 1528 - RNA, 20 nt, synthetic construct
  source 1..20: mol_type = other RNA
ccacggcccgcgcgccgccc

SEQ ID NO: 1529 - RNA, 20 nt, synthetic construct
  source 1..20: mol_type = other RNA
ccacggccgggcgccgagcg

SEQ ID NO: 1530 - RNA, 20 nt, synthetic construct
  source 1..20: mol_type = other RNA
ccagatgggggcggtggcac

SEQ ID NO: 1531 - RNA, 20 nt, synthetic construct
  source 1..20: mol_type = other RNA
ccagcaggcgcgcggcctgc

SEQ ID NO: 1532 - RNA, 20 nt, synthetic construct
  source 1..20: mol_type = other RNA
ccagccgctcggcgcccggc

SEQ ID NO: 1533 - RNA, 20 nt, synthetic construct
  source 1..20: mol_type = other RNA
ccaggatctgctccagcagg

SEQ ID NO: 1534 - RNA, 20 nt, synthetic construct
  source 1..20: mol_type = other RNA
ccaggcaccgccagccgctc

SEQ ID NO: 1535 - RNA, 20 nt, synthetic construct
  source 1..20: mol_type = other RNA
ccaggccggcgcccacggcc

SEQ ID NO: 1536 - RNA, 20 nt, synthetic construct
  source 1..20: mol_type = other RNA
ccaggcctcctccaccagtt

SEQ ID NO: 1537 - RNA, 20 nt, synthetic construct
  source 1..20: mol_type = other RNA
ccagggcgtcctgcacctcg

SEQ ID NO: 1538 - RNA, 20 nt, synthetic construct
  source 1..20: mol_type = other RNA
ccagggtctgtgcgacgcca

SEQ ID NO: 1539 - RNA, 20 nt, synthetic construct
  source 1..20: mol_type = other RNA
ccagttggaagacctcggcc

SEQ ID NO: 1540 - RNA, 20 nt, synthetic construct
  source 1..20: mol_type = other RNA
ccatccgcctcgatggcggc

SEQ ID NO: 1541 - RNA, 20 nt, synthetic construct
  source 1..20: mol_type = other RNA
ccatcgaggcggatggcgtc

SEQ ID NO: 1542 - RNA, 20 nt, synthetic construct
  source 1..20: mol_type = other RNA
ccatctggcccaggcaccgc

SEQ ID NO: 1543 - RNA, 20 nt, synthetic construct
  source 1..20: mol_type = other RNA
ccatgggcccgtgccaccgc

SEQ ID NO: 1544 - RNA, 20 nt, synthetic construct
  source 1..20: mol_type = other RNA
ccatggtcctgacgctgctt

SEQ ID NO: 1545 - RNA, 20 nt, synthetic construct
  source 1..20: mol_type = other RNA
ccatgtcgggcccacggccg

SEQ ID NO: 1546 - RNA, 20 nt, synthetic construct
  source 1..20: mol_type = other RNA
cccaaccccggcctggcgcg

SEQ ID NO: 1547 - RNA, 20 nt, synthetic construct
  source 1..20: mol_type = other RNA
cccaccatgggcccgtgcca

SEQ ID NO: 1548 - RNA, 20 nt, synthetic construct
  source 1..20: mol_type = other RNA
cccacggcccgcgcgccgcc

SEQ ID NO: 1549 - RNA, 20 nt, synthetic construct
  source 1..20: mol_type = other RNA
cccacggccgggcgccgagc

SEQ ID NO: 1550 - RNA, 20 nt, synthetic construct
  source 1..20: mol_type = other RNA
cccaggcaccgccagccgct

SEQ ID NO: 1551 - RNA, 20 nt, synthetic construct
  source 1..20: mol_type = other RNA
cccagggtctgtgcgacgcc

SEQ ID NO: 1552 - RNA, 20 nt, synthetic construct
  source 1..20: mol_type = other RNA
cccatctggcccaggcaccg

SEQ ID NO: 1553 - RNA, 20 nt, synthetic construct
  source 1..20: mol_type = other RNA
cccatggtcctgacgctgct

SEQ ID NO: 1554 - RNA, 20 nt, synthetic construct
  source 1..20: mol_type = other RNA
ccccatctggcccaggcacc

SEQ ID NO: 1555 - RNA, 20 nt, synthetic construct
  source 1..20: mol_type = other RNA
cccccatctggcccaggcac

SEQ ID NO: 1556 - RNA, 20 nt, synthetic construct
  source 1..20: mol_type = other RNA
cccccgcggccccgcgccca

SEQ ID NO: 1557 - RNA, 20 nt, synthetic construct
  source 1..20: mol_type = other RNA
cccccggcgacacttcgcgg

SEQ ID NO: 1558 - RNA, 20 nt, synthetic construct
  source 1..20: mol_type = other RNA
ccccgcgaagtgtcgccggg

SEQ ID NO: 1559 - RNA, 20 nt, synthetic construct
  source 1..20: mol_type = other RNA
ccccgcgcccatggtcctga

SEQ ID NO: 1560 - RNA, 20 nt, synthetic construct
  source 1..20: mol_type = other RNA
ccccgcggccccgcgcccat

SEQ ID NO: 1561 - RNA, 20 nt, synthetic construct
  source 1..20: mol_type = other RNA
ccccggcctggcgcgctcac

SEQ ID NO: 1562 - RNA, 20 nt, synthetic construct
  source 1..20: mol_type = other RNA
ccccggcgacacttcgcggg

SEQ ID NO: 1563 - RNA, 20 nt, synthetic construct
  source 1..20: mol_type = other RNA
cccgacatggcgaagaagcg

SEQ ID NO: 1564 - RNA, 20 nt, synthetic construct
  source 1..20: mol_type = other RNA
cccgcctgcttcagcgcgga

SEQ ID NO: 1565 - RNA, 20 nt, synthetic construct
  source 1..20: mol_type = other RNA
cccgcgaagtgtcgccgggg

SEQ ID NO: 1566 - RNA, 20 nt, synthetic construct
  source 1..20: mol_type = other RNA
cccgcgcccatggtcctgac

SEQ ID NO: 1567 - RNA, 20 nt, synthetic construct
  source 1..20: mol_type = other RNA
cccgcgcgccgcccgcctgc

SEQ ID NO: 1568 - RNA, 20 nt, synthetic construct
  source 1..20: mol_type = other RNA
cccgcggccccgcgcccatg

SEQ ID NO: 1569 - RNA, 20 nt, synthetic construct
  source 1..20: mol_type = other RNA
cccggccgtgggcccgacat

SEQ ID NO: 1570 - RNA, 20 nt, synthetic construct
  source 1..20: mol_type = other RNA
cccggcctggcgcgctcacc

SEQ ID NO: 1571 - RNA, 20 nt, synthetic construct
  source 1..20: mol_type = other RNA
cccggcgacacttcgcgggg

SEQ ID NO: 1572 - RNA, 20 nt, synthetic construct
  source 1..20: mol_type = other RNA
cccgtgccaccgcccccatc

SEQ ID NO: 1573 - RNA, 20 nt, synthetic construct
  source 1..20: mol_type = other RNA
ccctggagcgcgcgctgccg

SEQ ID NO: 1574 - RNA, 20 nt, synthetic construct
  source 1..20: mol_type = other RNA
ccgacatggcgaagaagcga

SEQ ID NO: 1575 - RNA, 20 nt, synthetic construct
  source 1..20: mol_type = other RNA
ccgagcggctggcggtgcct

SEQ ID NO: 1576 - RNA, 20 nt, synthetic construct
  source 1..20: mol_type = other RNA
ccgaggtcttccaactggtg

SEQ ID NO: 1577 - RNA, 20 nt, synthetic construct
  source 1..20: mol_type = other RNA
ccgaggtgcaggacgccctg

SEQ ID NO: 1578 - RNA, 20 nt, synthetic construct
  source 1..20: mol_type = other RNA
ccgcaacagcaggtcgaggc

SEQ ID NO: 1579 - RNA, 20 nt, synthetic construct
  source 1..20: mol_type = other RNA
ccgccagccgctcggcgccc

SEQ ID NO: 1580 - RNA, 20 nt, synthetic construct
  source 1..20: mol_type = other RNA
ccgccatcgaggcggatggc

SEQ ID NO: 1581 - RNA, 20 nt, synthetic construct
  source 1..20: mol_type = other RNA
ccgcccccatctggcccagg

SEQ ID NO: 1582 - RNA, 20 nt, synthetic construct
  source 1..20: mol_type = other RNA
ccgcccgcctgcttcagcgc

SEQ ID NO: 1583 - RNA, 20 nt, synthetic construct
  source 1..20: mol_type = other RNA
ccgcctacaagctgtgtcgc

SEQ ID NO: 1584 - RNA, 20 nt, synthetic construct
  source 1..20: mol_type = other RNA
ccgcctcgatggcggcctcg

SEQ ID NO: 1585 - RNA, 20 nt, synthetic construct
  source 1..20: mol_type = other RNA
ccgcctgcttcagcgcggac

SEQ ID NO: 1586 - RNA, 20 nt, synthetic construct
  source 1..20: mol_type = other RNA
ccgcgaagtgtcgccggggg

SEQ ID NO: 1587 - RNA, 20 nt, synthetic construct
  source 1..20: mol_type = other RNA
ccgcgaggtagcccagggtc

SEQ ID NO: 1588 - RNA, 20 nt, synthetic construct
  source 1..20: mol_type = other RNA
ccgcgcccatggtcctgacg

SEQ ID NO: 1589 - RNA, 20 nt, synthetic construct
  source 1..20: mol_type = other RNA
ccgcgcgccgcccgcctgct

SEQ ID NO: 1590 - RNA, 20 nt, synthetic construct
  source 1..20: mol_type = other RNA
ccgcgcgcctgctggagcag

SEQ ID NO: 1591 - RNA, 20 nt, synthetic construct
  source 1..20: mol_type = other RNA
ccgcgctgaagcaggcgggc

SEQ ID NO: 1592 - RNA, 20 nt, synthetic construct
  source 1..20: mol_type = other RNA
ccgcggccccgcgcccatgg

SEQ ID NO: 1593 - RNA, 20 nt, synthetic construct
  source 1..20: mol_type = other RNA
ccgcgggccccgcgaagtgt

SEQ ID NO: 1594 - RNA, 20 nt, synthetic construct
  source 1..20: mol_type = other RNA
ccgctcggcgcccggccgtg

SEQ ID NO: 1595 - RNA, 20 nt, synthetic construct
  source 1..20: mol_type = other RNA
ccggagctgcagcaggcctt

SEQ ID NO: 1596 - RNA, 20 nt, synthetic construct
  source 1..20: mol_type = other RNA
ccggagttggagacgcgtgt

SEQ ID NO: 1597 - RNA, 20 nt, synthetic construct
  source 1..20: mol_type = other RNA
ccggcagcgcgcgctccagg

SEQ ID NO: 1598 - RNA, 20 nt, synthetic construct
  source 1..20: mol_type = other RNA
ccggccgtgggcccgacatg

SEQ ID NO: 1599 - RNA, 20 nt, synthetic construct
  source 1..20: mol_type = other RNA
ccggcctggccgaggtcttc

SEQ ID NO: 1600 - RNA, 20 nt, synthetic construct
  source 1..20: mol_type = other RNA
ccggcctggcgcgctcaccg

SEQ ID NO: 1601 - RNA, 20 nt, synthetic construct
  source 1..20: mol_type = other RNA
ccggcgacacttcgcggggc

SEQ ID NO: 1602 - RNA, 20 nt, synthetic construct
  source 1..20: mol_type = other RNA
ccggcgcccacggcccgcgc

SEQ ID NO: 1603 - RNA, 20 nt, synthetic construct
  source 1..20: mol_type = other RNA
ccggcgcctgcagcagccgc

SEQ ID NO: 1604 - RNA, 20 nt, synthetic construct
  source 1..20: mol_type = other RNA
ccgggcgccgagcggctggc

SEQ ID NO: 1605 - RNA, 20 nt, synthetic construct
  source 1..20: mol_type = other RNA
ccgggggcaggcaccgaggt

SEQ ID NO: 1606 - RNA, 20 nt, synthetic construct
  source 1..20: mol_type = other RNA
ccggtgagcgcgccaggccg

SEQ ID NO: 1607 - RNA, 20 nt, synthetic construct
  source 1..20: mol_type = other RNA
ccggttctcagccaccagga

SEQ ID NO: 1608 - RNA, 20 nt, synthetic construct
  source 1..20: mol_type = other RNA
ccgtgccaccgcccccatct

SEQ ID NO: 1609 - RNA, 20 nt, synthetic construct
  source 1..20: mol_type = other RNA
ccgtgggcccgacatggcga

SEQ ID NO: 1610 - RNA, 20 nt, synthetic construct
  source 1..20: mol_type = other RNA
ccgtgggccgcgaggtagcc

SEQ ID NO: 1611 - RNA, 20 nt, synthetic construct
  source 1..20: mol_type = other RNA
ccgtgggcgccggcctggcc

SEQ ID NO: 1612 - RNA, 20 nt, synthetic construct
  source 1..20: mol_type = other RNA
cctacaagctgtgtcgcttc

SEQ ID NO: 1613 - RNA, 20 nt, synthetic construct
  source 1..20: mol_type = other RNA
cctccaccagttggaagacc

SEQ ID NO: 1614 - RNA, 20 nt, synthetic construct
  source 1..20: mol_type = other RNA
cctcctccaccagttggaag

SEQ ID NO: 1615 - RNA, 20 nt, synthetic construct
  source 1..20: mol_type = other RNA
cctcgacctgctgttgcggc

SEQ ID NO: 1616 - RNA, 20 nt, synthetic construct
  source 1..20: mol_type = other RNA
cctcgatggcggcctcgacc

SEQ ID NO: 1617 - RNA, 20 nt, synthetic construct
  source 1..20: mol_type = other RNA
cctcggccaggccggcgccc

SEQ ID NO: 1618 - RNA, 20 nt, synthetic construct
  source 1..20: mol_type = other RNA
cctcggtgcctgcccccggc

SEQ ID NO: 1619 - RNA, 20 nt, synthetic construct
  source 1..20: mol_type = other RNA
cctgacgctgcttctctccg

SEQ ID NO: 1620 - RNA, 20 nt, synthetic construct
  source 1..20: mol_type = other RNA
cctgcacacgcgtctccaac

SEQ ID NO: 1621 - RNA, 20 nt, synthetic construct
  source 1..20: mol_type = other RNA
cctgcacctcggtgcctgcc

SEQ ID NO: 1622 - RNA, 20 nt, synthetic construct
  source 1..20: mol_type = other RNA
cctgcagcagccgcaacagc

SEQ ID NO: 1623 - RNA, 20 nt, synthetic construct
  source 1..20: mol_type = other RNA
cctgcccccggcgacacttc

SEQ ID NO: 1624 - RNA, 20 nt, synthetic construct
  source 1..20: mol_type = other RNA
cctgctgcagctccggcagc

SEQ ID NO: 1625 - RNA, 20 nt, synthetic construct
  source 1..20: mol_type = other RNA
cctgctggagcagatcctgg

SEQ ID NO: 1626 - RNA, 20 nt, synthetic construct
  source 1..20: mol_type = other RNA
cctgctgttgcggctgctgc

SEQ ID NO: 1627 - RNA, 20 nt, synthetic construct
  source 1..20: mol_type = other RNA
cctgcttcagcgcggacaag

SEQ ID NO: 1628 - RNA, 20 nt, synthetic construct
  source 1..20: mol_type = other RNA
cctggagcgcgcgctgccgg

SEQ ID NO: 1629 - RNA, 20 nt, synthetic construct
  source 1..20: mol_type = other RNA
cctggccgaggtcttccaac

SEQ ID NO: 1630 - RNA, 20 nt, synthetic construct
  source 1..20: mol_type = other RNA
cctggcgcgctcaccggttc

SEQ ID NO: 1631 - RNA, 20 nt, synthetic construct
  source 1..20: mol_type = other RNA
cctgggccagatgggggcgg

SEQ ID NO: 1632 - RNA, 20 nt, synthetic construct
  source 1..20: mol_type = other RNA
cctggtggctgagaaccggt

SEQ ID NO: 1633 - RNA, 20 nt, synthetic construct
  source 1..20: mol_type = other RNA
ccttgtccgcgctgaagcag

SEQ ID NO: 1634 - RNA, 20 nt, synthetic construct
  source 1..20: mol_type = other RNA
cgaagaagcgacacagcttg

SEQ ID NO: 1635 - RNA, 20 nt, synthetic construct
  source 1..20: mol_type = other RNA
cgaagtgtcgccgggggcag

SEQ ID NO: 1636 - RNA, 20 nt, synthetic construct
  source 1..20: mol_type = other RNA
cgacacagcttgtaggcgga

SEQ ID NO: 1637 - RNA, 20 nt, synthetic construct
  source 1..20: mol_type = other RNA
cgacacttcgcggggcccgc

SEQ ID NO: 1638 - RNA, 20 nt, synthetic construct
  source 1..20: mol_type = other RNA
cgacatggcgaagaagcgac

SEQ ID NO: 1639 - RNA, 20 nt, synthetic construct
  source 1..20: mol_type = other RNA
cgacctgctgttgcggctgc

SEQ ID NO: 1640 - RNA, 20 nt, synthetic construct
  source 1..20: mol_type = other RNA
cgacgccatccgcctcgatg

SEQ ID NO: 1641 - RNA, 20 nt, synthetic construct
  source 1..20: mol_type = other RNA
cgagcggctggcggtgcctg

SEQ ID NO: 1642 - RNA, 20 nt, synthetic construct
  source 1..20: mol_type = other RNA
cgaggccgccatcgaggcgg

SEQ ID NO: 1643 - RNA, 20 nt, synthetic construct
  source 1..20: mol_type = other RNA
cgaggcggatggcgtcgcac

SEQ ID NO: 1644 - RNA, 20 nt, synthetic construct
  source 1..20: mol_type = other RNA
cgaggtagcccagggtctgt

SEQ ID NO: 1645 - RNA, 20 nt, synthetic construct
  source 1..20: mol_type = other RNA
cgaggtcttccaactggtgg

SEQ ID NO: 1646 - RNA, 20 nt, synthetic construct
  source 1..20: mol_type = other RNA
cgaggtgcaggacgccctgg

SEQ ID NO: 1647 - RNA, 20 nt, synthetic construct
  source 1..20: mol_type = other RNA
cgatggcggcctcgacctgc

SEQ ID NO: 1648 - RNA, 20 nt, synthetic construct
  source 1..20: mol_type = other RNA
cgcaacagcaggtcgaggcc

SEQ ID NO: 1649 - RNA, 20 nt, synthetic construct
  source 1..20: mol_type = other RNA
cgcacagaccctgggctacc

SEQ ID NO: 1650 - RNA, 20 nt, synthetic construct
  source 1..20: mol_type = other RNA
cgccagccgctcggcgcccg

SEQ ID NO: 1651 - RNA, 20 nt, synthetic construct
  source 1..20: mol_type = other RNA
cgccatccgcctcgatggcg

SEQ ID NO: 1652 - RNA, 20 nt, synthetic construct
  source 1..20: mol_type = other RNA
cgccatcgaggcggatggcg

SEQ ID NO: 1653 - RNA, 20 nt, synthetic construct
  source 1..20: mol_type = other RNA
cgccatgtcgggcccacggc

SEQ ID NO: 1654 - RNA, 20 nt, synthetic construct
  source 1..20: mol_type = other RNA
cgcccacggcccgcgcgccg

SEQ ID NO: 1655 - RNA, 20 nt, synthetic construct
  source 1..20: mol_type = other RNA
cgcccatggtcctgacgctg

SEQ ID NO: 1656 - RNA, 20 nt, synthetic construct
  source 1..20: mol_type = other RNA
cgcccccatctggcccaggc

SEQ ID NO: 1657 - RNA, 20 nt, synthetic construct
  source 1..20: mol_type = other RNA
cgcccgcctgcttcagcgcg

SEQ ID NO: 1658 - RNA, 20 nt, synthetic construct
  source 1..20: mol_type = other RNA
cgcccggccgtgggcccgac

SEQ ID NO: 1659 - RNA, 20 nt, synthetic construct
  source 1..20: mol_type = other RNA
cgccctggagcgcgcgctgc

SEQ ID NO: 1660 - RNA, 20 nt, synthetic construct
  source 1..20: mol_type = other RNA
cgccgagcggctggcggtgc

SEQ ID NO: 1661 - RNA, 20 nt, synthetic construct
  source 1..20: mol_type = other RNA
cgccgcccgcctgcttcagc

SEQ ID NO: 1662 - RNA, 20 nt, synthetic construct
  source 1..20: mol_type = other RNA
cgccggagttggagacgcgt

SEQ ID NO: 1663 - RNA, 20 nt, synthetic construct
  source 1..20: mol_type = other RNA
cgccggcctggccgaggtct

SEQ ID NO: 1664 - RNA, 20 nt, synthetic construct
  source 1..20: mol_type = other RNA
cgccgggggcaggcaccgag

SEQ ID NO: 1665 - RNA, 20 nt, synthetic construct
  source 1..20: mol_type = other RNA
cgcctacaagctgtgtcgct

SEQ ID NO: 1666 - RNA, 20 nt, synthetic construct
  source 1..20: mol_type = other RNA
cgcctcgatggcggcctcga

SEQ ID NO: 1667 - RNA, 20 nt, synthetic construct
  source 1..20: mol_type = other RNA
cgcctgcagcagccgcaaca

SEQ ID NO: 1668 - RNA, 20 nt, synthetic construct
  source 1..20: mol_type = other RNA
cgcctgctggagcagatcct

SEQ ID NO: 1669 - RNA, 20 nt, synthetic construct
  source 1..20: mol_type = other RNA
cgcctgcttcagcgcggaca

SEQ ID NO: 1670 - RNA, 20 nt, synthetic construct
  source 1..20: mol_type = other RNA
cgcgaagtgtcgccgggggc

SEQ ID NO: 1671 - RNA, 20 nt, synthetic construct
  source 1..20: mol_type = other RNA
cgcgaggtagcccagggtct

SEQ ID NO: 1672 - RNA, 20 nt, synthetic construct
  source 1..20: mol_type = other RNA
cgcgcccatggtcctgacgc

SEQ ID NO: 1673 - RNA, 20 nt, synthetic construct
  source 1..20: mol_type = other RNA
cgcgccgcccgcctgcttca

SEQ ID NO: 1674 - RNA, 20 nt, synthetic construct
  source 1..20: mol_type = other RNA
cgcgcctgctggagcagatc

SEQ ID NO: 1675 - RNA, 20 nt, synthetic construct
  source 1..20: mol_type = other RNA
cgcgcgccgcccgcctgctt

SEQ ID NO: 1676 - RNA, 20 nt, synthetic construct
  source 1..20: mol_type = other RNA
cgcgcgcctgctggagcaga

SEQ ID NO: 1677 - RNA, 20 nt, synthetic construct
  source 1..20: mol_type = other RNA
cgcgcgctccagggcgtcct

SEQ ID NO: 1678 - RNA, 20 nt, synthetic construct
  source 1..20: mol_type = other RNA
cgcgcgctgccggagctgca

SEQ ID NO: 1679 - RNA, 20 nt, synthetic construct
  source 1..20: mol_type = other RNA
cgcgcggcctgcacacgcgt

SEQ ID NO: 1680 - RNA, 20 nt, synthetic construct
  source 1..20: mol_type = other RNA
cgcgcgggccgtgggcgccg

SEQ ID NO: 1681 - RNA, 20 nt, synthetic construct
  source 1..20: mol_type = other RNA
cgcgctcaccggttctcagc

SEQ ID NO: 1682 - RNA, 20 nt, synthetic construct
  source 1..20: mol_type = other RNA
cgcgctccagggcgtcctgc

SEQ ID NO: 1683 - RNA, 20 nt, synthetic construct
  source 1..20: mol_type = other RNA
cgcgctgaagcaggcgggcg

SEQ ID NO: 1684 - RNA, 20 nt, synthetic construct
  source 1..20: mol_type = other RNA
cgcgctgccggagctgcagc

SEQ ID NO: 1685 - RNA, 20 nt, synthetic construct
  source 1..20: mol_type = other RNA
cgcggacaaggcctgctgca

SEQ ID NO: 1686 - RNA, 20 nt, synthetic construct
  source 1..20: mol_type = other RNA
cgcggccccgcgcccatggt

SEQ ID NO: 1687 - RNA, 20 nt, synthetic construct
  source 1..20: mol_type = other RNA
cgcggcctgcacacgcgtct

SEQ ID NO: 1688 - RNA, 20 nt, synthetic construct
  source 1..20: mol_type = other RNA
cgcgggccccgcgaagtgtc

SEQ ID NO: 1689 - RNA, 20 nt, synthetic construct
  source 1..20: mol_type = other RNA
cgcgggccgtgggcgccggc

SEQ ID NO: 1690 - RNA, 20 nt, synthetic construct
  source 1..20: mol_type = other RNA
cgcgtctccaactccggcgc

SEQ ID NO: 1691 - RNA, 20 nt, synthetic construct
  source 1..20: mol_type = other RNA
cgcgtgtgcaggccgcgcgc

SEQ ID NO: 1692 - RNA, 20 nt, synthetic construct
  source 1..20: mol_type = other RNA
cgctcaccggttctcagcca

SEQ ID NO: 1693 - RNA, 20 nt, synthetic construct
  source 1..20: mol_type = other RNA
cgctccagggcgtcctgcac

SEQ ID NO: 1694 - RNA, 20 nt, synthetic construct
  source 1..20: mol_type = other RNA
cgctcggcgcccggccgtgg

SEQ ID NO: 1695 - RNA, 20 nt, synthetic construct
  source 1..20: mol_type = other RNA
cgctgaagcaggcgggcggc

SEQ ID NO: 1696 - RNA, 20 nt, synthetic construct
  source 1..20: mol_type = other RNA
cgctgccggagctgcagcag

SEQ ID NO: 1697 - RNA, 20 nt, synthetic construct
  source 1..20: mol_type = other RNA
cgctgcttctctccgcctac

SEQ ID NO: 1698 - RNA, 20 nt, synthetic construct
  source 1..20: mol_type = other RNA
cgcttcttcgccatgtcggg

SEQ ID NO: 1699 - RNA, 20 nt, synthetic construct
  source 1..20: mol_type = other RNA
cggacaaggcctgctgcagc

SEQ ID NO: 1700 - RNA, 20 nt, synthetic construct
  source 1..20: mol_type = other RNA
cggagagaagcagcgtcagg

SEQ ID NO: 1701 - RNA, 20 nt, synthetic construct
  source 1..20: mol_type = other RNA
cggagctgcagcaggccttg

SEQ ID NO: 1702 - RNA, 20 nt, synthetic construct
  source 1..20: mol_type = other RNA
cggagttggagacgcgtgtg

SEQ ID NO: 1703 - RNA, 20 nt, synthetic construct
  source 1..20: mol_type = other RNA
cggatggcgtcgcacagacc

SEQ ID NO: 1704 - RNA, 20 nt, synthetic construct
  source 1..20: mol_type = other RNA
cggcagcgcgcgctccaggg

SEQ ID NO: 1705 - RNA, 20 nt, synthetic construct
  source 1..20: mol_type = other RNA
cggccaggccggcgcccacg

SEQ ID NO: 1706 - RNA, 20 nt, synthetic construct
  source 1..20: mol_type = other RNA
cggccccgcgcccatggtcc

SEQ ID NO: 1707 - RNA, 20 nt, synthetic construct
  source 1..20: mol_type = other RNA
cggcccgcgcgccgcccgcc

SEQ ID NO: 1708 - RNA, 20 nt, synthetic construct
  source 1..20: mol_type = other RNA
cggccgggcgccgagcggct

SEQ ID NO: 1709 - RNA, 20 nt, synthetic construct
  source 1..20: mol_type = other RNA
cggccgtgggcccgacatgg

SEQ ID NO: 1710 - RNA, 20 nt, synthetic construct
  source 1..20: mol_type = other RNA
cggcctcgacctgctgttgc

SEQ ID NO: 1711 - RNA, 20 nt, synthetic construct
  source 1..20: mol_type = other RNA
cggcctgcacacgcgtctcc

SEQ ID NO: 1712 - RNA, 20 nt, synthetic construct
  source 1..20: mol_type = other RNA
cggcctggccgaggtcttcc

SEQ ID NO: 1713 - RNA, 20 nt, synthetic construct
  source 1..20: mol_type = other RNA
cggcctggcgcgctcaccgg

SEQ ID NO: 1714 - RNA, 20 nt, synthetic construct
  source 1..20: mol_type = other RNA
cggcgacacttcgcggggcc

SEQ ID NO: 1715 - RNA, 20 nt, synthetic construct
  source 1..20: mol_type = other RNA
cggcgcccacggcccgcgcg

SEQ ID NO: 1716 - RNA, 20 nt, synthetic construct
  source 1..20: mol_type = other RNA
cggcgcccggccgtgggccc

SEQ ID NO: 1717 - RNA, 20 nt, synthetic construct
  source 1..20: mol_type = other RNA
cggcgcctgcagcagccgca

SEQ ID NO: 1718 - RNA, 20 nt, synthetic construct
  source 1..20: mol_type = other RNA
cggcgcgcgggccgtgggcg

SEQ ID NO: 1719 - RNA, 20 nt, synthetic construct
  source 1..20: mol_type = other RNA
cggctgctgcaggcgccgga

SEQ ID NO: 1720 - RNA, 20 nt, synthetic construct
  source 1..20: mol_type = other RNA
cggctggcggtgcctgggcc

SEQ ID NO: 1721 - RNA, 20 nt, synthetic construct
  source 1..20: mol_type = other RNA
cgggcccacggccgggcgcc

SEQ ID NO: 1722 - RNA, 20 nt, synthetic construct
  source 1..20: mol_type = other RNA
cgggccccgcgaagtgtcgc

SEQ ID NO: 1723 - RNA, 20 nt, synthetic construct
  source 1..20: mol_type = other RNA
cgggccgtgggcgccggcct

SEQ ID NO: 1724 - RNA, 20 nt, synthetic construct
  source 1..20: mol_type = other RNA
cgggcgccgagcggctggcg

SEQ ID NO: 1725 - RNA, 20 nt, synthetic construct
  source 1..20: mol_type = other RNA
cgggcggcgcgcgggccgtg

SEQ ID NO: 1726 - RNA, 20 nt, synthetic construct
  source 1..20: mol_type = other RNA
cgggggcaggcaccgaggtg

SEQ ID NO: 1727 - RNA, 20 nt, synthetic construct
  source 1..20: mol_type = other RNA
cgggtggccgcgggccccgc

SEQ ID NO: 1728 - RNA, 20 nt, synthetic construct
  source 1..20: mol_type = other RNA
cggtgagcgcgccaggccgg

SEQ ID NO: 1729 - RNA, 20 nt, synthetic construct
  source 1..20: mol_type = other RNA
cggtgcctgcccccggcgac

SEQ ID NO: 1730 - RNA, 20 nt, synthetic construct
  source 1..20: mol_type = other RNA
cggtgcctgggccagatggg

SEQ ID NO: 1731 - RNA, 20 nt, synthetic construct
  source 1..20: mol_type = other RNA
cggttctcagccaccaggat

SEQ ID NO: 1732 - RNA, 20 nt, synthetic construct
  source 1..20: mol_type = other RNA
cgtcaggaccatgggcgcgg

SEQ ID NO: 1733 - RNA, 20 nt, synthetic construct
  source 1..20: mol_type = other RNA
cgtcctgcacctcggtgcct

SEQ ID NO: 1734 - RNA, 20 nt, synthetic construct
  source 1..20: mol_type = other RNA
cgtcgcacagaccctgggct

SEQ ID NO: 1735 - RNA, 20 nt, synthetic construct
  source 1..20: mol_type = other RNA
cgtctccaactccggcgcct

SEQ ID NO: 1736 - RNA, 20 nt, synthetic construct
  source 1..20: mol_type = other RNA
cgtgccaccgcccccatctg

SEQ ID NO: 1737 - RNA, 20 nt, synthetic construct
  source 1..20: mol_type = other RNA
cgtgggcccgacatggcgaa

SEQ ID NO: 1738 - RNA, 20 nt, synthetic construct
  source 1..20: mol_type = other RNA
cgtgggccgcgaggtagccc

SEQ ID NO: 1739 - RNA, 20 nt, synthetic construct
  source 1..20: mol_type = other RNA
cgtgggcgccggcctggccg

SEQ ID NO: 1740 - RNA, 20 nt, synthetic construct
  source 1..20: mol_type = other RNA
cgtgtgcaggccgcgcgcct

SEQ ID NO: 1741 - RNA, 20 nt, synthetic construct
  source 1..20: mol_type = other RNA
ctacaagctgtgtcgcttct

SEQ ID NO: 1742 - RNA, 20 nt, synthetic construct
  source 1..20: mol_type = other RNA
ctcaccggttctcagccacc

SEQ ID NO: 1743 - RNA, 20 nt, synthetic construct
  source 1..20: mol_type = other RNA
ctcagccaccaggatctgct

SEQ ID NO: 1744 - RNA, 20 nt, synthetic construct
  source 1..20: mol_type = other RNA
ctccaactccggcgcctgca

SEQ ID NO: 1745 - RNA, 20 nt, synthetic construct
  source 1..20: mol_type = other RNA
ctccaccagttggaagacct

SEQ ID NO: 1746 - RNA, 20 nt, synthetic construct
  source 1..20: mol_type = other RNA
ctccagcaggcgcgcggcct

SEQ ID NO: 1747 - RNA, 20 nt, synthetic construct
  source 1..20: mol_type = other RNA
ctccagggcgtcctgcacct

SEQ ID NO: 1748 - RNA, 20 nt, synthetic construct
  source 1..20: mol_type = other RNA
ctcccaaccccggcctggcg

SEQ ID NO: 1749 - RNA, 20 nt, synthetic construct
  source 1..20: mol_type = other RNA
ctccgcctacaagctgtgtc

SEQ ID NO: 1750 - RNA, 20 nt, synthetic construct
  source 1..20: mol_type = other RNA
ctccggcagcgcgcgctcca

SEQ ID NO: 1751 - RNA, 20 nt, synthetic construct
  source 1..20: mol_type = other RNA
ctccggcgcctgcagcagcc

SEQ ID NO: 1752 - RNA, 20 nt, synthetic construct
  source 1..20: mol_type = other RNA
ctcctccaccagttggaaga

SEQ ID NO: 1753 - RNA, 20 nt, synthetic construct
  source 1..20: mol_type = other RNA
ctcgacctgctgttgcggct

SEQ ID NO: 1754 - RNA, 20 nt, synthetic construct
  source 1..20: mol_type = other RNA
ctcgatggcggcctcgacct

SEQ ID NO: 1755 - RNA, 20 nt, synthetic construct
  source 1..20: mol_type = other RNA
ctcggccaggccggcgccca

SEQ ID NO: 1756 - RNA, 20 nt, synthetic construct
  source 1..20: mol_type = other RNA
ctcggcgcccggccgtgggc

SEQ ID NO: 1757 - RNA, 20 nt, synthetic construct
  source 1..20: mol_type = other RNA
ctcggtgcctgcccccggcg

SEQ ID NO: 1758 - RNA, 20 nt, synthetic construct
  source 1..20: mol_type = other RNA
ctctccgcctacaagctgtg

SEQ ID NO: 1759 - RNA, 20 nt, synthetic construct
  source 1..20: mol_type = other RNA
ctgaagcaggcgggcggcgc

SEQ ID NO: 1760 - RNA, 20 nt, synthetic construct
  source 1..20: mol_type = other RNA
ctgacgctgcttctctccgc

SEQ ID NO: 1761 - RNA, 20 nt, synthetic construct
  source 1..20: mol_type = other RNA
ctgagaaccggtgagcgcgc

SEQ ID NO: 1762 - RNA, 20 nt, synthetic construct
  source 1..20: mol_type = other RNA
ctgcacacgcgtctccaact

SEQ ID NO: 1763 - RNA, 20 nt, synthetic construct
  source 1..20: mol_type = other RNA
ctgcacctcggtgcctgccc

SEQ ID NO: 1764 - RNA, 20 nt, synthetic construct
  source 1..20: mol_type = other RNA
ctgcagcagccgcaacagca

SEQ ID NO: 1765 - RNA, 20 nt, synthetic construct
  source 1..20: mol_type = other RNA
ctgcagcaggccttgtccgc

SEQ ID NO: 1766 - RNA, 20 nt, synthetic construct
  source 1..20: mol_type = other RNA
ctgcagctccggcagcgcgc

SEQ ID NO: 1767 - RNA, 20 nt, synthetic construct
  source 1..20: mol_type = other RNA
ctgcaggcgccggagttgga

SEQ ID NO: 1768 - RNA, 20 nt, synthetic construct
  source 1..20: mol_type = other RNA
ctgcccccggcgacacttcg

SEQ ID NO: 1769 - RNA, 20 nt, synthetic construct
  source 1..20: mol_type = other RNA
ctgccggagctgcagcaggc

SEQ ID NO: 1770 - RNA, 20 nt, synthetic construct
  source 1..20: mol_type = other RNA
ctgctccagcaggcgcgcgg

SEQ ID NO: 1771 - RNA, 20 nt, synthetic construct
  source 1..20: mol_type = other RNA
ctgctgcagctccggcagcg

SEQ ID NO: 1772 - RNA, 20 nt, synthetic construct
  source 1..20: mol_type = other RNA
ctgctgcaggcgccggagtt

SEQ ID NO: 1773 - RNA, 20 nt, synthetic construct
  source 1..20: mol_type = other RNA
ctgctggagcagatcctggt

SEQ ID NO: 1774 - RNA, 20 nt, synthetic construct
  source 1..20: mol_type = other RNA
ctgctgttgcggctgctgca

SEQ ID NO: 1775 - RNA, 20 nt, synthetic construct
  source 1..20: mol_type = other RNA
ctgcttcagcgcggacaagg

SEQ ID NO: 1776 - RNA, 20 nt, synthetic construct
  source 1..20: mol_type = other RNA
ctgcttctctccgcctacaa

SEQ ID NO: 1777 - RNA, 20 nt, synthetic construct
  source 1..20: mol_type = other RNA
ctggagcagatcctggtggc

SEQ ID NO: 1778 - RNA, 20 nt, synthetic construct
  source 1..20: mol_type = other RNA
ctggagcgcgcgctgccgga

SEQ ID NO: 1779 - RNA, 20 nt, synthetic construct
  source 1..20: mol_type = other RNA
ctggcccaggcaccgccagc

SEQ ID NO: 1780 - RNA, 20 nt, synthetic construct
  source 1..20: mol_type = other RNA
ctggccgaggtcttccaact

SEQ ID NO: 1781 - RNA, 20 nt, synthetic construct
  source 1..20: mol_type = other RNA
ctggcgcgctcaccggttct

SEQ ID NO: 1782 - RNA, 20 nt, synthetic construct
  source 1..20: mol_type = other RNA
ctggcggtgcctgggccaga

SEQ ID NO: 1783 - RNA, 20 nt, synthetic construct
  source 1..20: mol_type = other RNA
ctgggccagatgggggcggt

SEQ ID NO: 1784 - RNA, 20 nt, synthetic construct
  source 1..20: mol_type = other RNA
ctggtggctgagaaccggtg

SEQ ID NO: 1785 - RNA, 20 nt, synthetic construct
  source 1..20: mol_type = other RNA
ctgtgcgacgccatccgcct

SEQ ID NO: 1786 - RNA, 20 nt, synthetic construct
  source 1..20: mol_type = other RNA
ctgtgtcgcttcttcgccat

SEQ ID NO: 1787 - RNA, 20 nt, synthetic construct
  source 1..20: mol_type = other RNA
ctgttgcggctgctgcaggc

SEQ ID NO: 1788 - RNA, 20 nt, synthetic construct
  source 1..20: mol_type = other RNA
cttcagcgcggacaaggcct

SEQ ID NO: 1789 - RNA, 20 nt, synthetic construct
  source 1..20: mol_type = other RNA
cttccaactggtggaggagg

SEQ ID NO: 1790 - RNA, 20 nt, synthetic construct
  source 1..20: mol_type = other RNA
cttcgccatgtcgggcccac

SEQ ID NO: 1791 - RNA, 20 nt, synthetic construct
  source 1..20: mol_type = other RNA
cttctctccgcctacaagct

SEQ ID NO: 1792 - RNA, 20 nt, synthetic construct
  source 1..20: mol_type = other RNA
cttcttcgccatgtcgggcc

SEQ ID NO: 1793 - RNA, 20 nt, synthetic construct
  source 1..20: mol_type = other RNA
cttgtaggcggagagaagca

SEQ ID NO: 1794 - RNA, 20 nt, synthetic construct
  source 1..20: mol_type = other RNA
cttgtccgcgctgaagcagg

SEQ ID NO: 1795 - RNA, 20 nt, synthetic construct
  source 1..20: mol_type = other RNA
gaaccggtgagcgcgccagg

SEQ ID NO: 1796 - RNA, 20 nt, synthetic construct
  source 1..20: mol_type = other RNA
gaagaagcgacacagcttgt

SEQ ID NO: 1797 - RNA, 20 nt, synthetic construct
  source 1..20: mol_type = other RNA
gaagacctcggccaggccgg

SEQ ID NO: 1798 - RNA, 20 nt, synthetic construct
  source 1..20: mol_type = other RNA
gaagcagcgtcaggaccatg

SEQ ID NO: 1799 - RNA, 20 nt, synthetic construct
  source 1..20: mol_type = other RNA
gaagcaggcgggcggcgcgc

SEQ ID NO: 1800 - RNA, 20 nt, synthetic construct
  source 1..20: mol_type = other RNA
gaagcgacacagcttgtagg

SEQ ID NO: 1801 - RNA, 20 nt, synthetic construct
  source 1..20: mol_type = other RNA
gaagtgtcgccgggggcagg

SEQ ID NO: 1802 - RNA, 20 nt, synthetic construct
  source 1..20: mol_type = other RNA
gacaaggcctgctgcagctc

SEQ ID NO: 1803 - RNA, 20 nt, synthetic construct
  source 1..20: mol_type = other RNA
gacacagcttgtaggcggag

SEQ ID NO: 1804 - RNA, 20 nt, synthetic construct
  source 1..20: mol_type = other RNA
gacacttcgcggggcccgcg

SEQ ID NO: 1805 - RNA, 20 nt, synthetic construct
  source 1..20: mol_type = other RNA
gacatggcgaagaagcgaca

SEQ ID NO: 1806 - RNA, 20 nt, synthetic construct
  source 1..20: mol_type = other RNA
gaccatgggcgcggggccgc

SEQ ID NO: 1807 - RNA, 20 nt, synthetic construct
  source 1..20: mol_type = other RNA
gaccctgggctacctcgcgg

SEQ ID NO: 1808 - RNA, 20 nt, synthetic construct
  source 1..20: mol_type = other RNA
gacctcggccaggccggcgc

SEQ ID NO: 1809 - RNA, 20 nt, synthetic construct
  source 1..20: mol_type = other RNA
gacctgctgttgcggctgct

SEQ ID NO: 1810 - RNA, 20 nt, synthetic construct
  source 1..20: mol_type = other RNA
gacgccatccgcctcgatgg

SEQ ID NO: 1811 - RNA, 20 nt, synthetic construct
  source 1..20: mol_type = other RNA
gacgccctggagcgcgcgct

SEQ ID NO: 1812 - RNA, 20 nt, synthetic construct
  source 1..20: mol_type = other RNA
gacgcgtgtgcaggccgcgc

SEQ ID NO: 1813 - RNA, 20 nt, synthetic construct
  source 1..20: mol_type = other RNA
gacgctgcttctctccgcct

SEQ ID NO: 1814 - RNA, 20 nt, synthetic construct
  source 1..20: mol_type = other RNA
gagaaccggtgagcgcgcca

SEQ ID NO: 1815 - RNA, 20 nt, synthetic construct
  source 1..20: mol_type = other RNA
gagaagcagcgtcaggacca

SEQ ID NO: 1816 - RNA, 20 nt, synthetic construct
  source 1..20: mol_type = other RNA
gagacgcgtgtgcaggccgc

SEQ ID NO: 1817 - RNA, 20 nt, synthetic construct
  source 1..20: mol_type = other RNA
gagagaagcagcgtcaggac

SEQ ID NO: 1818 - RNA, 20 nt, synthetic construct
  source 1..20: mol_type = other RNA
gagcagatcctggtggctga

SEQ ID NO: 1819 - RNA, 20 nt, synthetic construct
  source 1..20: mol_type = other RNA
gagcgcgcgctgccggagct

SEQ ID NO: 1820 - RNA, 20 nt, synthetic construct
  source 1..20: mol_type = other RNA
gagcggctggcggtgcctgg

SEQ ID NO: 1821 - RNA, 20 nt, synthetic construct
  source 1..20: mol_type = other RNA
gagctgcagcaggccttgtc

SEQ ID NO: 1822 - RNA, 20 nt, synthetic construct
  source 1..20: mol_type = other RNA
gaggccgccatcgaggcgga

SEQ ID NO: 1823 - RNA, 20 nt, synthetic construct
  source 1..20: mol_type = other RNA
gaggcggatggcgtcgcaca

SEQ ID NO: 1824 - RNA, 20 nt, synthetic construct
  source 1..20: mol_type = other RNA
gaggtagcccagggtctgtg

SEQ ID NO: 1825 - RNA, 20 nt, synthetic construct
  source 1..20: mol_type = other RNA
gaggtcttccaactggtgga

SEQ ID NO: 1826 - RNA, 20 nt, synthetic construct
  source 1..20: mol_type = other RNA
gaggtgcaggacgccctgga

SEQ ID NO: 1827 - RNA, 20 nt, synthetic construct
  source 1..20: mol_type = other RNA
gagttggagacgcgtgtgca

SEQ ID NO: 1828 - RNA, 20 nt, synthetic construct
  source 1..20: mol_type = other RNA
gatcctggtggctgagaacc

SEQ ID NO: 1829 - RNA, 20 nt, synthetic construct
  source 1..20: mol_type = other RNA
gatctgctccagcaggcgcg

SEQ ID NO: 1830 - RNA, 20 nt, synthetic construct
  source 1..20: mol_type = other RNA
gatggcggcctcgacctgct

SEQ ID NO: 1831 - RNA, 20 nt, synthetic construct
  source 1..20: mol_type = other RNA
gatggcgtcgcacagaccct

SEQ ID NO: 1832 - RNA, 20 nt, synthetic construct
  source 1..20: mol_type = other RNA
gatgggggcggtggcacggg

SEQ ID NO: 1833 - RNA, 20 nt, synthetic construct
  source 1..20: mol_type = other RNA
gcaacagcaggtcgaggccg

SEQ ID NO: 1834 - RNA, 20 nt, synthetic construct
  source 1..20: mol_type = other RNA
gcacacgcgtctccaactcc

SEQ ID NO: 1835 - RNA, 20 nt, synthetic construct
  source 1..20: mol_type = other RNA
gcacagaccctgggctacct

SEQ ID NO: 1836 - RNA, 20 nt, synthetic construct
  source 1..20: mol_type = other RNA
gcaccgaggtgcaggacgcc

SEQ ID NO: 1837 - RNA, 20 nt, synthetic construct
  source 1..20: mol_type = other RNA
gcaccgccagccgctcggcg

SEQ ID NO: 1838 - RNA, 20 nt, synthetic construct
  source 1..20: mol_type = other RNA
gcacctcggtgcctgccccc

SEQ ID NO: 1839 - RNA, 20 nt, synthetic construct
  source 1..20: mol_type = other RNA
gcagatcctggtggctgaga

SEQ ID NO: 1840 - RNA, 20 nt, synthetic construct
  source 1..20: mol_type = other RNA
gcagcagccaggcctcctcc

SEQ ID NO: 1841 - RNA, 20 nt, synthetic construct
  source 1..20: mol_type = other RNA
gcagcagccgcaacagcagg

SEQ ID NO: 1842 - RNA, 20 nt, synthetic construct
  source 1..20: mol_type = other RNA
gcagcaggccttgtccgcgc

SEQ ID NO: 1843 - RNA, 20 nt, synthetic construct
  source 1..20: mol_type = other RNA
gcagccaggcctcctccacc

SEQ ID NO: 1844 - RNA, 20 nt, synthetic construct
  source 1..20: mol_type = other RNA
gcagccgcaacagcaggtcg

SEQ ID NO: 1845 - RNA, 20 nt, synthetic construct
  source 1..20: mol_type = other RNA
gcagcgcgcgctccagggcg

SEQ ID NO: 1846 - RNA, 20 nt, synthetic construct
  source 1..20: mol_type = other RNA
gcagcgtcaggaccatgggc

SEQ ID NO: 1847 - RNA, 20 nt, synthetic construct
  source 1..20: mol_type = other RNA
gcagctccggcagcgcgcgc

SEQ ID NO: 1848 - RNA, 20 nt, synthetic construct
  source 1..20: mol_type = other RNA
gcaggacgccctggagcgcg

SEQ ID NO: 1849 - RNA, 20 nt, synthetic construct
  source 1..20: mol_type = other RNA
gcaggcaccgaggtgcagga

SEQ ID NO: 1850 - RNA, 20 nt, synthetic construct
  source 1..20: mol_type = other RNA
gcaggccgcgcgcctgctgg

SEQ ID NO: 1851 - RNA, 20 nt, synthetic construct
  source 1..20: mol_type = other RNA
gcaggccttgtccgcgctga

SEQ ID NO: 1852 - RNA, 20 nt, synthetic construct
  source 1..20: mol_type = other RNA
gcaggcgccggagttggaga

SEQ ID NO: 1853 - RNA, 20 nt, synthetic construct
  source 1..20: mol_type = other RNA
gcaggcgcgcggcctgcaca

SEQ ID NO: 1854 - RNA, 20 nt, synthetic construct
  source 1..20: mol_type = other RNA
gcaggcgggcggcgcgcggg

SEQ ID NO: 1855 - RNA, 20 nt, synthetic construct
  source 1..20: mol_type = other RNA
gcaggtcgaggccgccatcg

SEQ ID NO: 1856 - RNA, 20 nt, synthetic construct
  source 1..20: mol_type = other RNA
gccaccaggatctgctccag

SEQ ID NO: 1857 - RNA, 20 nt, synthetic construct
  source 1..20: mol_type = other RNA
gccaccgcccccatctggcc

SEQ ID NO: 1858 - RNA, 20 nt, synthetic construct
  source 1..20: mol_type = other RNA
gccagatgggggcggtggca

SEQ ID NO: 1859 - RNA, 20 nt, synthetic construct
  source 1..20: mol_type = other RNA
gccagccgctcggcgcccgg

SEQ ID NO: 1860 - RNA, 20 nt, synthetic construct
  source 1..20: mol_type = other RNA
gccaggccggcgcccacggc

SEQ ID NO: 1861 - RNA, 20 nt, synthetic construct
  source 1..20: mol_type = other RNA
gccaggcctcctccaccagt

SEQ ID NO: 1862 - RNA, 20 nt, synthetic construct
  source 1..20: mol_type = other RNA
gccatccgcctcgatggcgg

SEQ ID NO: 1863 - RNA, 20 nt, synthetic construct
  source 1..20: mol_type = other RNA
gccatcgaggcggatggcgt

SEQ ID NO: 1864 - RNA, 20 nt, synthetic construct
  source 1..20: mol_type = other RNA
gccatgtcgggcccacggcc

SEQ ID NO: 1865 - RNA, 20 nt, synthetic construct
  source 1..20: mol_type = other RNA
gcccaccatgggcccgtgcc

SEQ ID NO: 1866 - RNA, 20 nt, synthetic construct
  source 1..20: mol_type = other RNA
gcccacggcccgcgcgccgc

SEQ ID NO: 1867 - RNA, 20 nt, synthetic construct
  source 1..20: mol_type = other RNA
gcccacggccgggcgccgag

SEQ ID NO: 1868 - RNA, 20 nt, synthetic construct
  source 1..20: mol_type = other RNA
gcccaggcaccgccagccgc

SEQ ID NO: 1869 - RNA, 20 nt, synthetic construct
  source 1..20: mol_type = other RNA
gcccagggtctgtgcgacgc

SEQ ID NO: 1870 - RNA, 20 nt, synthetic construct
  source 1..20: mol_type = other RNA
gcccatggtcctgacgctgc

SEQ ID NO: 1871 - RNA, 20 nt, synthetic construct
  source 1..20: mol_type = other RNA
gcccccatctggcccaggca

SEQ ID NO: 1872 - RNA, 20 nt, synthetic construct
  source 1..20: mol_type = other RNA
gcccccggcgacacttcgcg

SEQ ID NO: 1873 - RNA, 20 nt, synthetic construct
  source 1..20: mol_type = other RNA
gccccgcgaagtgtcgccgg

SEQ ID NO: 1874 - RNA, 20 nt, synthetic construct
  source 1..20: mol_type = other RNA
gccccgcgcccatggtcctg

SEQ ID NO: 1875 - RNA, 20 nt, synthetic construct
  source 1..20: mol_type = other RNA
gcccgacatggcgaagaagc

SEQ ID NO: 1876 - RNA, 20 nt, synthetic construct
  source 1..20: mol_type = other RNA
gcccgcctgcttcagcgcgg

SEQ ID NO: 1877 - RNA, 20 nt, synthetic construct
  source 1..20: mol_type = other RNA
gcccgcgcgccgcccgcctg

SEQ ID NO: 1878 - RNA, 20 nt, synthetic construct
  source 1..20: mol_type = other RNA
gcccggccgtgggcccgaca

SEQ ID NO: 1879 - RNA, 20 nt, synthetic construct
  source 1..20: mol_type = other RNA
gcccgtgccaccgcccccat

SEQ ID NO: 1880 - RNA, 20 nt, synthetic construct
  source 1..20: mol_type = other RNA
gccctggagcgcgcgctgcc

SEQ ID NO: 1881 - RNA, 20 nt, synthetic construct
  source 1..20: mol_type = other RNA
gccgagcggctggcggtgcc

SEQ ID NO: 1882 - RNA, 20 nt, synthetic construct
  source 1..20: mol_type = other RNA
gccgaggtcttccaactggt

SEQ ID NO: 1883 - RNA, 20 nt, synthetic construct
  source 1..20: mol_type = other RNA
gccgcaacagcaggtcgagg

SEQ ID NO: 1884 - RNA, 20 nt, synthetic construct
  source 1..20: mol_type = other RNA
gccgccatcgaggcggatgg

SEQ ID NO: 1885 - RNA, 20 nt, synthetic construct
  source 1..20: mol_type = other RNA
gccgcccgcctgcttcagcg

SEQ ID NO: 1886 - RNA, 20 nt, synthetic construct
  source 1..20: mol_type = other RNA
gccgcgaggtagcccagggt

SEQ ID NO: 1887 - RNA, 20 nt, synthetic construct
  source 1..20: mol_type = other RNA
gccgcgcgcctgctggagca

SEQ ID NO: 1888 - RNA, 20 nt, synthetic construct
  source 1..20: mol_type = other RNA
gccgcgggccccgcgaagtg

SEQ ID NO: 1889 - RNA, 20 nt, synthetic construct
  source 1..20: mol_type = other RNA
gccgctcggcgcccggccgt

SEQ ID NO: 1890 - RNA, 20 nt, synthetic construct
  source 1..20: mol_type = other RNA
gccggagctgcagcaggcct

SEQ ID NO: 1891 - RNA, 20 nt, synthetic construct
  source 1..20: mol_type = other RNA
gccggagttggagacgcgtg

SEQ ID NO: 1892 - RNA, 20 nt, synthetic construct
  source 1..20: mol_type = other RNA
gccggcctggccgaggtctt

SEQ ID NO: 1893 - RNA, 20 nt, synthetic construct
  source 1..20: mol_type = other RNA
gccggcgcccacggcccgcg

SEQ ID NO: 1894 - RNA, 20 nt, synthetic construct
  source 1..20: mol_type = other RNA
gccgggcgccgagcggctgg

SEQ ID NO: 1895 - RNA, 20 nt, synthetic construct
  source 1..20: mol_type = other RNA
gccgggggcaggcaccgagg

SEQ ID NO: 1896 - RNA, 20 nt, synthetic construct
  source 1..20: mol_type = other RNA
gccgtgggcccgacatggcg

SEQ ID NO: 1897 - RNA, 20 nt, synthetic construct
  source 1..20: mol_type = other RNA
gccgtgggccgcgaggtagc

SEQ ID NO: 1898 - RNA, 20 nt, synthetic construct
  source 1..20: mol_type = other RNA
gccgtgggcgccggcctggc

SEQ ID NO: 1899 - RNA, 20 nt, synthetic construct
  source 1..20: mol_type = other RNA
gcctacaagctgtgtcgctt

SEQ ID NO: 1900 - RNA, 20 nt, synthetic construct
  source 1..20: mol_type = other RNA
gcctcctccaccagttggaa

SEQ ID NO: 1901 - RNA, 20 nt, synthetic construct
  source 1..20: mol_type = other RNA
gcctcgacctgctgttgcgg

SEQ ID NO: 1902 - RNA, 20 nt, synthetic construct
  source 1..20: mol_type = other RNA
gcctcgatggcggcctcgac

SEQ ID NO: 1903 - RNA, 20 nt, synthetic construct
  source 1..20: mol_type = other RNA
gcctgcacacgcgtctccaa

SEQ ID NO: 1904 - RNA, 20 nt, synthetic construct
  source 1..20: mol_type = other RNA
gcctgcagcagccgcaacag

SEQ ID NO: 1905 - RNA, 20 nt, synthetic construct
  source 1..20: mol_type = other RNA
gcctgcccccggcgacactt

SEQ ID NO: 1906 - RNA, 20 nt, synthetic construct
  source 1..20: mol_type = other RNA
gcctgctgcagctccggcag

SEQ ID NO: 1907 - RNA, 20 nt, synthetic construct
  source 1..20: mol_type = other RNA
gcctgctggagcagatcctg

SEQ ID NO: 1908 - RNA, 20 nt, synthetic construct
  source 1..20: mol_type = other RNA
gcctgcttcagcgcggacaa

SEQ ID NO: 1909 - RNA, 20 nt, synthetic construct
  source 1..20: mol_type = other RNA
gcctggccgaggtcttccaa

SEQ ID NO: 1910 - RNA, 20 nt, synthetic construct
  source 1..20: mol_type = other RNA
gcctggcgcgctcaccggtt

SEQ ID NO: 1911 - RNA, 20 nt, synthetic construct
  source 1..20: mol_type = other RNA
gcctgggccagatgggggcg

SEQ ID NO: 1912 - RNA, 20 nt, synthetic construct
  source 1..20: mol_type = other RNA
gccttgtccgcgctgaagca

SEQ ID NO: 1913 - RNA, 20 nt, synthetic construct
  source 1..20: mol_type = other RNA
gcgaagaagcgacacagctt

SEQ ID NO: 1914 - RNA, 20 nt, synthetic construct
  source 1..20: mol_type = other RNA
gcgaagtgtcgccgggggca

SEQ ID NO: 1915 - RNA, 20 nt, synthetic construct
  source 1..20: mol_type = other RNA
gcgacacagcttgtaggcgg

SEQ ID NO: 1916 - RNA, 20 nt, synthetic construct
  source 1..20: mol_type = other RNA
gcgacacttcgcggggcccg

SEQ ID NO: 1917 - RNA, 20 nt, synthetic construct
  source 1..20: mol_type = other RNA
gcgacgccatccgcctcgat

SEQ ID NO: 1918 - RNA, 20 nt, synthetic construct
  source 1..20: mol_type = other RNA
gcgaggtagcccagggtctg

SEQ ID NO: 1919 - RNA, 20 nt, synthetic construct
  source 1..20: mol_type = other RNA
gcgcccacggcccgcgcgcc

SEQ ID NO: 1920 - RNA, 20 nt, synthetic construct
  source 1..20: mol_type = other RNA
gcgcccatggtcctgacgct

SEQ ID NO: 1921 - RNA, 20 nt, synthetic construct
  source 1..20: mol_type = other RNA
gcgcccggccgtgggcccga

SEQ ID NO: 1922 - RNA, 20 nt, synthetic construct
  source 1..20: mol_type = other RNA
gcgccgagcggctggcggtg

SEQ ID NO: 1923 - RNA, 20 nt, synthetic construct
  source 1..20: mol_type = other RNA
gcgccgcccgcctgcttcag

SEQ ID NO: 1924 - RNA, 20 nt, synthetic construct
  source 1..20: mol_type = other RNA
gcgccggagttggagacgcg

SEQ ID NO: 1925 - RNA, 20 nt, synthetic construct
  source 1..20: mol_type = other RNA
gcgccggcctggccgaggtc

SEQ ID NO: 1926 - RNA, 20 nt, synthetic construct
  source 1..20: mol_type = other RNA
gcgcctgcagcagccgcaac

SEQ ID NO: 1927 - RNA, 20 nt, synthetic construct
  source 1..20: mol_type = other RNA
gcgcctgctggagcagatcc

SEQ ID NO: 1928 - RNA, 20 nt, synthetic construct
  source 1..20: mol_type = other RNA
gcgcgccgcccgcctgcttc

SEQ ID NO: 1929 - RNA, 20 nt, synthetic construct
  source 1..20: mol_type = other RNA
gcgcgcctgctggagcagat

SEQ ID NO: 1930 - RNA, 20 nt, synthetic construct
  source 1..20: mol_type = other RNA
gcgcgcgctccagggcgtcc

SEQ ID NO: 1931 - RNA, 20 nt, synthetic construct
  source 1..20: mol_type = other RNA
gcgcgcgctgccggagctgc

SEQ ID NO: 1932 - RNA, 20 nt, synthetic construct
  source 1..20: mol_type = other RNA
gcgcgcggcctgcacacgcg

SEQ ID NO: 1933 - RNA, 20 nt, synthetic construct
  source 1..20: mol_type = other RNA
gcgcgcgggccgtgggcgcc

SEQ ID NO: 1934 - RNA, 20 nt, synthetic construct
  source 1..20: mol_type = other RNA
gcgcgctcaccggttctcag

SEQ ID NO: 1935 - RNA, 20 nt, synthetic construct
  source 1..20: mol_type = other RNA
gcgcgctccagggcgtcctg

SEQ ID NO: 1936 - RNA, 20 nt, synthetic construct
  source 1..20: mol_type = other RNA
gcgcgctgccggagctgcag

SEQ ID NO: 1937 - RNA, 20 nt, synthetic construct
  source 1..20: mol_type = other RNA
gcgcggacaaggcctgctgc

SEQ ID NO: 1938 - RNA, 20 nt, synthetic construct
  source 1..20: mol_type = other RNA
gcgcggcctgcacacgcgtc

SEQ ID NO: 1939 - RNA, 20 nt, synthetic construct
  source 1..20: mol_type = other RNA
gcgcgggccgtgggcgccgg

SEQ ID NO: 1940 - RNA, 20 nt, synthetic construct
  source 1..20: mol_type = other RNA
gcgctcaccggttctcagcc

SEQ ID NO: 1941 - RNA, 20 nt, synthetic construct
  source 1..20: mol_type = other RNA
gcgctccagggcgtcctgca

SEQ ID NO: 1942 - RNA, 20 nt, synthetic construct
  source 1..20: mol_type = other RNA
gcgctgaagcaggcgggcgg

SEQ ID NO: 1943 - RNA, 20 nt, synthetic construct
  source 1..20: mol_type = other RNA
gcgctgccggagctgcagca

SEQ ID NO: 1944 - RNA, 20 nt, synthetic construct
  source 1..20: mol_type = other RNA
gcggacaaggcctgctgcag

SEQ ID NO: 1945 - RNA, 20 nt, synthetic construct
  source 1..20: mol_type = other RNA
gcggagagaagcagcgtcag

SEQ ID NO: 1946 - RNA, 20 nt, synthetic construct
  source 1..20: mol_type = other RNA
gcggatggcgtcgcacagac

SEQ ID NO: 1947 - RNA, 20 nt, synthetic construct
  source 1..20: mol_type = other RNA
gcggccccgcgcccatggtc

SEQ ID NO: 1948 - RNA, 20 nt, synthetic construct
  source 1..20: mol_type = other RNA
gcggcctcgacctgctgttg

SEQ ID NO: 1949 - RNA, 20 nt, synthetic construct
  source 1..20: mol_type = other RNA
gcggcctgcacacgcgtctc

SEQ ID NO: 1950 - RNA, 20 nt, synthetic construct
  source 1..20: mol_type = other RNA
gcggcgcgcgggccgtgggc

SEQ ID NO: 1951 - RNA, 20 nt, synthetic construct
  source 1..20: mol_type = other RNA
gcggctgctgcaggcgccgg

SEQ ID NO: 1952 - RNA, 20 nt, synthetic construct
  source 1..20: mol_type = other RNA
gcggctggcggtgcctgggc

SEQ ID NO: 1953 - RNA, 20 nt, synthetic construct
  source 1..20: mol_type = other RNA
gcgggccccgcgaagtgtcg

SEQ ID NO: 1954 - RNA, 20 nt, synthetic construct
  source 1..20: mol_type = other RNA
gcgggccgtgggcgccggcc

SEQ ID NO: 1955 - RNA, 20 nt, synthetic construct
  source 1..20: mol_type = other RNA
gcgggcggcgcgcgggccgt

SEQ ID NO: 1956 - RNA, 20 nt, synthetic construct
  source 1..20: mol_type = other RNA
gcggtgcctgggccagatgg

SEQ ID NO: 1957 - RNA, 20 nt, synthetic construct
  source 1..20: mol_type = other RNA
gcgtcaggaccatgggcgcg

SEQ ID NO: 1958 - RNA, 20 nt, synthetic construct
  source 1..20: mol_type = other RNA
gcgtcctgcacctcggtgcc

SEQ ID NO: 1959 - RNA, 20 nt, synthetic construct
  source 1..20: mol_type = other RNA
gcgtcgcacagaccctgggc

SEQ ID NO: 1960 - RNA, 20 nt, synthetic construct
  source 1..20: mol_type = other RNA
gcgtctccaactccggcgcc

SEQ ID NO: 1961 - RNA, 20 nt, synthetic construct
  source 1..20: mol_type = other RNA
gcgtgtgcaggccgcgcgcc

SEQ ID NO: 1962 - RNA, 20 nt, synthetic construct
  source 1..20: mol_type = other RNA
gctcaccggttctcagccac

SEQ ID NO: 1963 - RNA, 20 nt, synthetic construct
  source 1..20: mol_type = other RNA
gctccagcaggcgcgcggcc

SEQ ID NO: 1964 - RNA, 20 nt, synthetic construct
  source 1..20: mol_type = other RNA
gctccagggcgtcctgcacc

SEQ ID NO: 1965 - RNA, 20 nt, synthetic construct
  source 1..20: mol_type = other RNA
gctccggcagcgcgcgctcc

SEQ ID NO: 1966 - RNA, 20 nt, synthetic construct
  source 1..20: mol_type = other RNA
gctcggcgcccggccgtggg

SEQ ID NO: 1967 - RNA, 20 nt, synthetic construct
  source 1..20: mol_type = other RNA
gctgaagcaggcgggcggcg

SEQ ID NO: 1968 - RNA, 20 nt, synthetic construct
  source 1..20: mol_type = other RNA
gctgagaaccggtgagcgcg

SEQ ID NO: 1969 - RNA, 20 nt, synthetic construct
  source 1..20: mol_type = other RNA
gctgcagcaggccttgtccg

SEQ ID NO: 1970 - RNA, 20 nt, synthetic construct
  source 1..20: mol_type = other RNA
gctgcagctccggcagcgcg

SEQ ID NO: 1971 - RNA, 20 nt, synthetic construct
  source 1..20: mol_type = other RNA
gctgcaggcgccggagttgg

SEQ ID NO: 1972 - RNA, 20 nt, synthetic construct
  source 1..20: mol_type = other RNA
gctgccggagctgcagcagg

SEQ ID NO: 1973 - RNA, 20 nt, synthetic construct
  source 1..20: mol_type = other RNA
gctgctgcaggcgccggagt

SEQ ID NO: 1974 - RNA, 20 nt, synthetic construct
  source 1..20: mol_type = other RNA
gctgcttctctccgcctaca

SEQ ID NO: 1975 - RNA, 20 nt, synthetic construct
  source 1..20: mol_type = other RNA
gctggagcagatcctggtgg

SEQ ID NO: 1976 - RNA, 20 nt, synthetic construct
  source 1..20: mol_type = other RNA
gctggcggtgcctgggccag

SEQ ID NO: 1977 - RNA, 20 nt, synthetic construct
  source 1..20: mol_type = other RNA
gctgtgtcgcttcttcgcca

SEQ ID NO: 1978 - RNA, 20 nt, synthetic construct
  source 1..20: mol_type = other RNA
gctgttgcggctgctgcagg

SEQ ID NO: 1979 - RNA, 20 nt, synthetic construct
  source 1..20: mol_type = other RNA
gcttcagcgcggacaaggcc

SEQ ID NO: 1980 - RNA, 20 nt, synthetic construct
  source 1..20: mol_type = other RNA
gcttctctccgcctacaagc

SEQ ID NO: 1981 - RNA, 20 nt, synthetic construct
  source 1..20: mol_type = other RNA
gcttcttcgccatgtcgggc

SEQ ID NO: 1982 - RNA, 20 nt, synthetic construct
  source 1..20: mol_type = other RNA
gcttgtaggcggagagaagc

SEQ ID NO: 1983 - RNA, 20 nt, synthetic construct
  source 1..20: mol_type = other RNA
ggaagacctcggccaggccg

SEQ ID NO: 1984 - RNA, 20 nt, synthetic construct
  source 1..20: mol_type = other RNA
ggacaaggcctgctgcagct

SEQ ID NO: 1985 - RNA, 20 nt, synthetic construct
  source 1..20: mol_type = other RNA
ggaccatgggcgcggggccg

SEQ ID NO: 1986 - RNA, 20 nt, synthetic construct
  source 1..20: mol_type = other RNA
ggacgccctggagcgcgcgc

SEQ ID NO: 1987 - RNA, 20 nt, synthetic construct
  source 1..20: mol_type = other RNA
ggagacgcgtgtgcaggccg

SEQ ID NO: 1988 - RNA, 20 nt, synthetic construct
  source 1..20: mol_type = other RNA
ggagagaagcagcgtcagga

SEQ ID NO: 1989 - RNA, 20 nt, synthetic construct
  source 1..20: mol_type = other RNA
ggagcagatcctggtggctg

SEQ ID NO: 1990 - RNA, 20 nt, synthetic construct
  source 1..20: mol_type = other RNA
ggagcgcgcgctgccggagc

SEQ ID NO: 1991 - RNA, 20 nt, synthetic construct
  source 1..20: mol_type = other RNA
ggagctgcagcaggccttgt

SEQ ID NO: 1992 - RNA, 20 nt, synthetic construct
  source 1..20: mol_type = other RNA
ggagttggagacgcgtgtgc

SEQ ID NO: 1993 - RNA, 20 nt, synthetic construct
  source 1..20: mol_type = other RNA
ggatctgctccagcaggcgc

SEQ ID NO: 1994 - RNA, 20 nt, synthetic construct
  source 1..20: mol_type = other RNA
ggatggcgtcgcacagaccc

SEQ ID NO: 1995 - RNA, 20 nt, synthetic construct
  source 1..20: mol_type = other RNA
ggcaccgaggtgcaggacgc

SEQ ID NO: 1996 - RNA, 20 nt, synthetic construct
  source 1..20: mol_type = other RNA
ggcaccgccagccgctcggc

SEQ ID NO: 1997 - RNA, 20 nt, synthetic construct
  source 1..20: mol_type = other RNA
ggcagcgcgcgctccagggc

SEQ ID NO: 1998 - RNA, 20 nt, synthetic construct
  source 1..20: mol_type = other RNA
ggcaggcaccgaggtgcagg

SEQ ID NO: 1999 - RNA, 20 nt, synthetic construct
  source 1..20: mol_type = other RNA
ggccagatgggggcggtggc

SEQ ID NO: 2000 - RNA, 20 nt, synthetic construct
  source 1..20: mol_type = other RNA
ggccaggccggcgcccacgg

SEQ ID NO: 2001 - RNA, 20 nt, synthetic construct
  source 1..20: mol_type = other RNA
ggcccacggccgggcgccga

SEQ ID NO: 2002 - RNA, 20 nt, synthetic construct
  source 1..20: mol_type = other RNA
ggcccaggcaccgccagccg

SEQ ID NO: 2003 - RNA, 20 nt, synthetic construct
  source 1..20: mol_type = other RNA
ggccccgcgaagtgtcgccg

SEQ ID NO: 2004 - RNA, 20 nt, synthetic construct
  source 1..20: mol_type = other RNA
ggccccgcgcccatggtcct

SEQ ID NO: 2005 - RNA, 20 nt, synthetic construct
  source 1..20: mol_type = other RNA
ggcccgacatggcgaagaag

SEQ ID NO: 2006 - RNA, 20 nt, synthetic construct
  source 1..20: mol_type = other RNA
ggcccgcgcgccgcccgcct

SEQ ID NO: 2007 - RNA, 20 nt, synthetic construct
  source 1..20: mol_type = other RNA
ggcccgtgccaccgccccca

SEQ ID NO: 2008 - RNA, 20 nt, synthetic construct
  source 1..20: mol_type = other RNA
ggccgaggtcttccaactgg

SEQ ID NO: 2009 - RNA, 20 nt, synthetic construct
  source 1..20: mol_type = other RNA
ggccgccatcgaggcggatg

SEQ ID NO: 2010 - RNA, 20 nt, synthetic construct
  source 1..20: mol_type = other RNA
ggccgcgaggtagcccaggg

SEQ ID NO: 2011 - RNA, 20 nt, synthetic construct
  source 1..20: mol_type = other RNA
ggccgcgcgcctgctggagc

SEQ ID NO: 2012 - RNA, 20 nt, synthetic construct
  source 1..20: mol_type = other RNA
ggccgcgggccccgcgaagt

SEQ ID NO: 2013 - RNA, 20 nt, synthetic construct
  source 1..20: mol_type = other RNA
ggccggcgcccacggcccgc

SEQ ID NO: 2014 - RNA, 20 nt, synthetic construct
  source 1..20: mol_type = other RNA
ggccgggcgccgagcggctg

SEQ ID NO: 2015 - RNA, 20 nt, synthetic construct
  source 1..20: mol_type = other RNA
ggccgtgggcccgacatggc

SEQ ID NO: 2016 - RNA, 20 nt, synthetic construct
  source 1..20: mol_type = other RNA
ggccgtgggccgcgaggtag

SEQ ID NO: 2017 - RNA, 20 nt, synthetic construct
  source 1..20: mol_type = other RNA
ggccgtgggcgccggcctgg

SEQ ID NO: 2018 - RNA, 20 nt, synthetic construct
  source 1..20: mol_type = other RNA
ggcctcctccaccagttgga

SEQ ID NO: 2019 - RNA, 20 nt, synthetic construct
  source 1..20: mol_type = other RNA
ggcctcgacctgctgttgcg

SEQ ID NO: 2020 - RNA, 20 nt, synthetic construct
  source 1..20: mol_type = other RNA
ggcctgcacacgcgtctcca

SEQ ID NO: 2021 - RNA, 20 nt, synthetic construct
  source 1..20: mol_type = other RNA
ggcctgctgcagctccggca

SEQ ID NO: 2022 - RNA, 20 nt, synthetic construct
  source 1..20: mol_type = other RNA
ggcctggccgaggtcttcca

SEQ ID NO: 2023 - RNA, 20 nt, synthetic construct
  source 1..20: mol_type = other RNA
ggcctggcgcgctcaccggt

SEQ ID NO: 2024 - RNA, 20 nt, synthetic construct
  source 1..20: mol_type = other RNA
ggccttgtccgcgctgaagc

SEQ ID NO: 2025 - RNA, 20 nt, synthetic construct
  source 1..20: mol_type = other RNA
ggcgaagaagcgacacagct

SEQ ID NO: 2026 - RNA, 20 nt, synthetic construct
  source 1..20: mol_type = other RNA
ggcgacacttcgcggggccc

SEQ ID NO: 2027 - RNA, 20 nt, synthetic construct
  source 1..20: mol_type = other RNA
ggcgcccacggcccgcgcgc

SEQ ID NO: 2028 - RNA, 20 nt, synthetic construct
  source 1..20: mol_type = other RNA
ggcgcccggccgtgggcccg

SEQ ID NO: 2029 - RNA, 20 nt, synthetic construct
  source 1..20: mol_type = other RNA
ggcgccgagcggctggcggt

SEQ ID NO: 2030 - RNA, 20 nt, synthetic construct
  source 1..20: mol_type = other RNA
ggcgccggagttggagacgc

SEQ ID NO: 2031 - RNA, 20 nt, synthetic construct
  source 1..20: mol_type = other RNA
ggcgccggcctggccgaggt

SEQ ID NO: 2032 - RNA, 20 nt, synthetic construct
  source 1..20: mol_type = other RNA
ggcgcctgcagcagccgcaa

SEQ ID NO: 2033 - RNA, 20 nt, synthetic construct
  source 1..20: mol_type = other RNA
ggcgcgcggcctgcacacgc

SEQ ID NO: 2034 - RNA, 20 nt, synthetic construct
  source 1..20: mol_type = other RNA
ggcgcgcgggccgtgggcgc

SEQ ID NO: 2035 - RNA, 20 nt, synthetic construct
  source 1..20: mol_type = other RNA
ggcgcgctcaccggttctca

SEQ ID NO: 2036 - RNA, 20 nt, synthetic construct
  source 1..20: mol_type = other RNA
ggcggagagaagcagcgtca

SEQ ID NO: 2037 - RNA, 20 nt, synthetic construct
  source 1..20: mol_type = other RNA
ggcggatggcgtcgcacaga

SEQ ID NO: 2038 - RNA, 20 nt, synthetic construct
  source 1..20: mol_type = other RNA
ggcggcctcgacctgctgtt

SEQ ID NO: 2039 - RNA, 20 nt, synthetic construct
  source 1..20: mol_type = other RNA
ggcggcgcgcgggccgtggg

SEQ ID NO: 2040 - RNA, 20 nt, synthetic construct
  source 1..20: mol_type = other RNA
ggcgggcggcgcgcgggccg

SEQ ID NO: 2041 - RNA, 20 nt, synthetic construct
  source 1..20: mol_type = other RNA
ggcggtgcctgggccagatg

SEQ ID NO: 2042 - RNA, 20 nt, synthetic construct
  source 1..20: mol_type = other RNA
ggcgtcctgcacctcggtgc

SEQ ID NO: 2043 - RNA, 20 nt, synthetic construct
  source 1..20: mol_type = other RNA
ggcgtcgcacagaccctggg

SEQ ID NO: 2044 - RNA, 20 nt, synthetic construct
  source 1..20: mol_type = other RNA
ggctgagaaccggtgagcgc

SEQ ID NO: 2045 - RNA, 20 nt, synthetic construct
  source 1..20: mol_type = other RNA
ggctgctgcaggcgccggag

SEQ ID NO: 2046 - RNA, 20 nt, synthetic construct
  source 1..20: mol_type = other RNA
ggctggcggtgcctgggcca

SEQ ID NO: 2047 - RNA, 20 nt, synthetic construct
  source 1..20: mol_type = other RNA
gggcaggcaccgaggtgcag

SEQ ID NO: 2048 - RNA, 20 nt, synthetic construct
  source 1..20: mol_type = other RNA
gggccagatgggggcggtgg

SEQ ID NO: 2049 - RNA, 20 nt, synthetic construct
  source 1..20: mol_type = other RNA
gggcccacggccgggcgccg

SEQ ID NO: 2050 - RNA, 20 nt, synthetic construct
  source 1..20: mol_type = other RNA
gggccccgcgaagtgtcgcc

SEQ ID NO: 2051 - RNA, 20 nt, synthetic construct
  source 1..20: mol_type = other RNA
gggcccgacatggcgaagaa

SEQ ID NO: 2052 - RNA, 20 nt, synthetic construct
  source 1..20: mol_type = other RNA
gggcccgtgccaccgccccc

SEQ ID NO: 2053 - RNA, 20 nt, synthetic construct
  source 1..20: mol_type = other RNA
gggccgcgaggtagcccagg

SEQ ID NO: 2054 - RNA, 20 nt, synthetic construct
  source 1..20: mol_type = other RNA
gggccgtgggcgccggcctg

SEQ ID NO: 2055 - RNA, 20 nt, synthetic construct
  source 1..20: mol_type = other RNA
gggcgccgagcggctggcgg

SEQ ID NO: 2056 - RNA, 20 nt, synthetic construct
  source 1..20: mol_type = other RNA
gggcgccggcctggccgagg

SEQ ID NO: 2057 - RNA, 20 nt, synthetic construct
  source 1..20: mol_type = other RNA
gggcggcgcgcgggccgtgg

SEQ ID NO: 2058 - RNA, 20 nt, synthetic construct
  source 1..20: mol_type = other RNA
gggcggtggcacgggcccat

SEQ ID NO: 2059 - RNA, 20 nt, synthetic construct
  source 1..20: mol_type = other RNA
gggcgtcctgcacctcggtg

SEQ ID NO: 2060 - RNA, 20 nt, synthetic construct
  source 1..20: mol_type = other RNA
ggggcaggcaccgaggtgca

SEQ ID NO: 2061 - RNA, 20 nt, synthetic construct
  source 1..20: mol_type = other RNA
ggggcggtggcacgggccca

SEQ ID NO: 2062 - RNA, 20 nt, synthetic construct
  source 1..20: mol_type = other RNA
gggggcaggcaccgaggtgc

SEQ ID NO: 2063 - RNA, 20 nt, synthetic construct
  source 1..20: mol_type = other RNA
gggggcggtggcacgggccc

SEQ ID NO: 2064 - RNA, 20 nt, synthetic construct
  source 1..20: mol_type = other RNA
gggtctgtgcgacgccatcc

SEQ ID NO: 2065 - RNA, 20 nt, synthetic construct
  source 1..20: mol_type = other RNA
gggtggccgcgggccccgcg

SEQ ID NO: 2066 - RNA, 20 nt, synthetic construct
  source 1..20: mol_type = other RNA
ggtagcccagggtctgtgcg

SEQ ID NO: 2067 - RNA, 20 nt, synthetic construct
  source 1..20: mol_type = other RNA
ggtcctgacgctgcttctct

SEQ ID NO: 2068 - RNA, 20 nt, synthetic construct
  source 1..20: mol_type = other RNA
ggtcgaggccgccatcgagg

SEQ ID NO: 2069 - RNA, 20 nt, synthetic construct
  source 1..20: mol_type = other RNA
ggtctgtgcgacgccatccg

SEQ ID NO: 2070 - RNA, 20 nt, synthetic construct
  source 1..20: mol_type = other RNA
ggtcttccaactggtggagg

SEQ ID NO: 2071 - RNA, 20 nt, synthetic construct
  source 1..20: mol_type = other RNA
ggtgagcgcgccaggccggg

SEQ ID NO: 2072 - RNA, 20 nt, synthetic construct
  source 1..20: mol_type = other RNA
ggtgcaggacgccctggagc

SEQ ID NO: 2073 - RNA, 20 nt, synthetic construct
  source 1..20: mol_type = other RNA
ggtgcctgcccccggcgaca

SEQ ID NO: 2074 - RNA, 20 nt, synthetic construct
  source 1..20: mol_type = other RNA
ggtgcctgggccagatgggg

SEQ ID NO: 2075 - RNA, 20 nt, synthetic construct
  source 1..20: mol_type = other RNA
ggtggccgcgggccccgcga

SEQ ID NO: 2076 - RNA, 20 nt, synthetic construct
  source 1..20: mol_type = other RNA
ggtggctgagaaccggtgag

SEQ ID NO: 2077 - RNA, 20 nt, synthetic construct
  source 1..20: mol_type = other RNA
ggttctcagccaccaggatc

SEQ ID NO: 2078 - RNA, 20 nt, synthetic construct
  source 1..20: mol_type = other RNA
gtagcccagggtctgtgcga

SEQ ID NO: 2079 - RNA, 20 nt, synthetic construct
  source 1..20: mol_type = other RNA
gtaggcggagagaagcagcg

SEQ ID NO: 2080 - RNA, 20 nt, synthetic construct
  source 1..20: mol_type = other RNA
gtcaggaccatgggcgcggg

SEQ ID NO: 2081 - RNA, 20 nt, synthetic construct
  source 1..20: mol_type = other RNA
gtcccccgcggccccgcgcc

SEQ ID NO: 2082 - RNA, 20 nt, synthetic construct
  source 1..20: mol_type = other RNA
gtccgcgctgaagcaggcgg

SEQ ID NO: 2083 - RNA, 20 nt, synthetic construct
  source 1..20: mol_type = other RNA
gtcctgacgctgcttctctc

SEQ ID NO: 2084 - RNA, 20 nt, synthetic construct
  source 1..20: mol_type = other RNA
gtcctgcacctcggtgcctg

SEQ ID NO: 2085 - RNA, 20 nt, synthetic construct
  source 1..20: mol_type = other RNA
gtcgaggccgccatcgaggc

SEQ ID NO: 2086 - RNA, 20 nt, synthetic construct
  source 1..20: mol_type = other RNA
gtcgcacagaccctgggcta

SEQ ID NO: 2087 - RNA, 20 nt, synthetic construct
  source 1..20: mol_type = other RNA
gtcgccgggggcaggcaccg

SEQ ID NO: 2088 - RNA, 20 nt, synthetic construct
  source 1..20: mol_type = other RNA
gtcgcttcttcgccatgtcg

SEQ ID NO: 2089 - RNA, 20 nt, synthetic construct
  source 1..20: mol_type = other RNA
gtcgggcccacggccgggcg

SEQ ID NO: 2090 - RNA, 20 nt, synthetic construct
  source 1..20: mol_type = other RNA
gtctccaactccggcgcctg

SEQ ID NO: 2091 - RNA, 20 nt, synthetic construct
  source 1..20: mol_type = other RNA
gtctgtgcgacgccatccgc

SEQ ID NO: 2092 - RNA, 20 nt, synthetic construct
  source 1..20: mol_type = other RNA
gtcttccaactggtggagga

SEQ ID NO: 2093 - RNA, 20 nt, synthetic construct
  source 1..20: mol_type = other RNA
gtgagcgcgccaggccgggg

SEQ ID NO: 2094 - RNA, 20 nt, synthetic construct
  source 1..20: mol_type = other RNA
gtgcaggacgccctggagcg

SEQ ID NO: 2095 - RNA, 20 nt, synthetic construct
  source 1..20: mol_type = other RNA
gtgcaggccgcgcgcctgct

SEQ ID NO: 2096 - RNA, 20 nt, synthetic construct
  source 1..20: mol_type = other RNA
gtgccaccgcccccatctgg

SEQ ID NO: 2097 - RNA, 20 nt, synthetic construct
  source 1..20: mol_type = other RNA
gtgcctgcccccggcgacac

SEQ ID NO: 2098 - RNA, 20 nt, synthetic construct
  source 1..20: mol_type = other RNA
gtgcctgggccagatggggg

SEQ ID NO: 2099 - RNA, 20 nt, synthetic construct
  source 1..20: mol_type = other RNA
gtgcgacgccatccgcctcg

SEQ ID NO: 2100 - RNA, 20 nt, synthetic construct
  source 1..20: mol_type = other RNA
gtggccgcgggccccgcgaa

SEQ ID NO: 2101 - RNA, 20 nt, synthetic construct
  source 1..20: mol_type = other RNA
gtggctgagaaccggtgagc

SEQ ID NO: 2102 - RNA, 20 nt, synthetic construct
  source 1..20: mol_type = other RNA
gtgggcccgacatggcgaag

SEQ ID NO: 2103 - RNA, 20 nt, synthetic construct
  source 1..20: mol_type = other RNA
gtgggccgcgaggtagccca

SEQ ID NO: 2104 - RNA, 20 nt, synthetic construct
  source 1..20: mol_type = other RNA
gtgggcgccggcctggccga

SEQ ID NO: 2105 - RNA, 20 nt, synthetic construct
  source 1..20: mol_type = other RNA
gtgtcgccgggggcaggcac

SEQ ID NO: 2106 - RNA, 20 nt, synthetic construct
  source 1..20: mol_type = other RNA
gtgtcgcttcttcgccatgt

SEQ ID NO: 2107 - RNA, 20 nt, synthetic construct
  source 1..20: mol_type = other RNA
gtgtgcaggccgcgcgcctg

SEQ ID NO: 2108 - RNA, 20 nt, synthetic construct
  source 1..20: mol_type = other RNA
gttctcagccaccaggatct

SEQ ID NO: 2109 - RNA, 20 nt, synthetic construct
  source 1..20: mol_type = other RNA
gttgcggctgctgcaggcgc

SEQ ID NO: 2110 - RNA, 20 nt, synthetic construct
  source 1..20: mol_type = other RNA
gttggaagacctcggccagg

SEQ ID NO: 2111 - RNA, 20 nt, synthetic construct
  source 1..20: mol_type = other RNA
gttggagacgcgtgtgcagg

SEQ ID NO: 2112 - RNA, 20 nt, synthetic construct
  source 1..20: mol_type = other RNA
tacaagctgtgtcgcttctt

SEQ ID NO: 2113 - RNA, 20 nt, synthetic construct
  source 1..20: mol_type = other RNA
tagcccagggtctgtgcgac

SEQ ID NO: 2114 - RNA, 20 nt, synthetic construct
  source 1..20: mol_type = other RNA
taggcggagagaagcagcgt

SEQ ID NO: 2115 - RNA, 20 nt, synthetic construct
  source 1..20: mol_type = other RNA
tcaccggttctcagccacca

SEQ ID NO: 2116 - RNA, 20 nt, synthetic construct
  source 1..20: mol_type = other RNA
tcagccaccaggatctgctc

SEQ ID NO: 2117 - RNA, 20 nt, synthetic construct
  source 1..20: mol_type = other RNA
tcagcgcggacaaggcctgc

SEQ ID NO: 2118 - RNA, 20 nt, synthetic construct
  source 1..20: mol_type = other RNA
tcaggaccatgggcgcgggg

SEQ ID NO: 2119 - RNA, 20 nt, synthetic construct
  source 1..20: mol_type = other RNA
tccaactccggcgcctgcag

SEQ ID NO: 2120 - RNA, 20 nt, synthetic construct
  source 1..20: mol_type = other RNA
tccaactggtggaggaggcc

SEQ ID NO: 2121 - RNA, 20 nt, synthetic construct
  source 1..20: mol_type = other RNA
tccaccagttggaagacctc

SEQ ID NO: 2122 - RNA, 20 nt, synthetic construct
  source 1..20: mol_type = other RNA
tccagcaggcgcgcggcctg

SEQ ID NO: 2123 - RNA, 20 nt, synthetic construct
  source 1..20: mol_type = other RNA
tccagggcgtcctgcacctc

SEQ ID NO: 2124 - RNA, 20 nt, synthetic construct
  source 1..20: mol_type = other RNA
tcccaaccccggcctggcgc

SEQ ID NO: 2125 - RNA, 20 nt, synthetic construct
  source 1..20: mol_type = other RNA
tcccccgcggccccgcgccc

SEQ ID NO: 2126 - RNA, 20 nt, synthetic construct
  source 1..20: mol_type = other RNA
tccgcctacaagctgtgtcg

SEQ ID NO: 2127 - RNA, 20 nt, synthetic construct
  source 1..20: mol_type = other RNA
tccgcctcgatggcggcctc

SEQ ID NO: 2128 - RNA, 20 nt, synthetic construct
  source 1..20: mol_type = other RNA
tccgcgctgaagcaggcggg

SEQ ID NO: 2129 - RNA, 20 nt, synthetic construct
  source 1..20: mol_type = other RNA
tccggcagcgcgcgctccag

SEQ ID NO: 2130 - RNA, 20 nt, synthetic construct
  source 1..20: mol_type = other RNA
tccggcgcctgcagcagccg

SEQ ID NO: 2131 - RNA, 20 nt, synthetic construct
  source 1..20: mol_type = other RNA
tcctccaccagttggaagac

SEQ ID NO: 2132 - RNA, 20 nt, synthetic construct
  source 1..20: mol_type = other RNA
tcctgacgctgcttctctcc

SEQ ID NO: 2133 - RNA, 20 nt, synthetic construct
  source 1..20: mol_type = other RNA
tcctgcacctcggtgcctgc

SEQ ID NO: 2134 - RNA, 20 nt, synthetic construct
  source 1..20: mol_type = other RNA
tcctggtggctgagaaccgg

SEQ ID NO: 2135 - RNA, 20 nt, synthetic construct
  source 1..20: mol_type = other RNA
tcgacctgctgttgcggctg

SEQ ID NO: 2136 - RNA, 20 nt, synthetic construct
  source 1..20: mol_type = other RNA
tcgaggccgccatcgaggcg

SEQ ID NO: 2137 - RNA, 20 nt, synthetic construct
  source 1..20: mol_type = other RNA
tcgaggcggatggcgtcgca

SEQ ID NO: 2138 - RNA, 20 nt, synthetic construct
  source 1..20: mol_type = other RNA
tcgatggcggcctcgacctg

SEQ ID NO: 2139 - RNA, 20 nt, synthetic construct
  source 1..20: mol_type = other RNA
tcgcacagaccctgggctac

SEQ ID NO: 2140 - RNA, 20 nt, synthetic construct
  source 1..20: mol_type = other RNA
tcgccatgtcgggcccacgg

SEQ ID NO: 2141 - RNA, 20 nt, synthetic construct
  source 1..20: mol_type = other RNA
tcgccgggggcaggcaccga

SEQ ID NO: 2142 - RNA, 20 nt, synthetic construct
  source 1..20: mol_type = other RNA
tcgcttcttcgccatgtcgg

SEQ ID NO: 2143 - RNA, 20 nt, synthetic construct
  source 1..20: mol_type = other RNA
tcggccaggccggcgcccac

SEQ ID NO: 2144 - RNA, 20 nt, synthetic construct
  source 1..20: mol_type = other RNA
tcggcgcccggccgtgggcc

SEQ ID NO: 2145 - RNA, 20 nt, synthetic construct
  source 1..20: mol_type = other RNA
tcgggcccacggccgggcgc

SEQ ID NO: 2146 - RNA, 20 nt, synthetic construct
  source 1..20: mol_type = other RNA
tcggtgcctgcccccggcga

SEQ ID NO: 2147 - RNA, 20 nt, synthetic construct
  source 1..20: mol_type = other RNA
tctcagccaccaggatctgc

SEQ ID NO: 2148 - RNA, 20 nt, synthetic construct
  source 1..20: mol_type = other RNA
tctccaactccggcgcctgc

SEQ ID NO: 2149 - RNA, 20 nt, synthetic construct
  source 1..20: mol_type = other RNA
tctcccaaccccggcctggc

SEQ ID NO: 2150 - RNA, 20 nt, synthetic construct
  source 1..20: mol_type = other RNA
tctccgcctacaagctgtgt

SEQ ID NO: 2151 - RNA, 20 nt, synthetic construct
  source 1..20: mol_type = other RNA
tctctccgcctacaagctgt

SEQ ID NO: 2152 - RNA, 20 nt, synthetic construct
  source 1..20: mol_type = other RNA
tctgctccagcaggcgcgcg

SEQ ID NO: 2153 - RNA, 20 nt, synthetic construct
  source 1..20: mol_type = other RNA
tctggcccaggcaccgccag

SEQ ID NO: 2154 - RNA, 20 nt, synthetic construct
  source 1..20: mol_type = other RNA
tctgtgcgacgccatccgcc

SEQ ID NO: 2155 - RNA, 20 nt, synthetic construct
  source 1..20: mol_type = other RNA
tcttccaactggtggaggag

SEQ ID NO: 2156 - RNA, 20 nt, synthetic construct
  source 1..20: mol_type = other RNA
tcttcgccatgtcgggccca

SEQ ID NO: 2157 - RNA, 20 nt, synthetic construct
  source 1..20: mol_type = other RNA
tgaagcaggcgggcggcgcg

SEQ ID NO: 2158 - RNA, 20 nt, synthetic construct
  source 1..20: mol_type = other RNA
tgacgctgcttctctccgcc

SEQ ID NO: 2159 - RNA, 20 nt, synthetic construct
  source 1..20: mol_type = other RNA
tgagaaccggtgagcgcgcc

SEQ ID NO: 2160 - RNA, 20 nt, synthetic construct
  source 1..20: mol_type = other RNA
tgcacacgcgtctccaactc

SEQ ID NO: 2161 - RNA, 20 nt, synthetic construct
  source 1..20: mol_type = other RNA
tgcacctcggtgcctgcccc

SEQ ID NO: 2162 - RNA, 20 nt, synthetic construct
  source 1..20: mol_type = other RNA
tgcagcagccgcaacagcag

SEQ ID NO: 2163 - RNA, 20 nt, synthetic construct
  source 1..20: mol_type = other RNA
tgcagcaggccttgtccgcg

SEQ ID NO: 2164 - RNA, 20 nt, synthetic construct
  source 1..20: mol_type = other RNA
tgcagctccggcagcgcgcg

SEQ ID NO: 2165 - RNA, 20 nt, synthetic construct
  source 1..20: mol_type = other RNA
tgcaggacgccctggagcgc

SEQ ID NO: 2166 - RNA, 20 nt, synthetic construct
  source 1..20: mol_type = other RNA
tgcaggccgcgcgcctgctg

SEQ ID NO: 2167 - RNA, 20 nt, synthetic construct
  source 1..20: mol_type = other RNA
tgcaggcgccggagttggag

SEQ ID NO: 2168 - RNA, 20 nt, synthetic construct
  source 1..20: mol_type = other RNA
tgccaccgcccccatctggc

SEQ ID NO: 2169 - RNA, 20 nt, synthetic construct
  source 1..20: mol_type = other RNA
tgcccccggcgacacttcgc

SEQ ID NO: 2170 - RNA, 20 nt, synthetic construct
  source 1..20: mol_type = other RNA
tgccggagctgcagcaggcc

SEQ ID NO: 2171 - RNA, 20 nt, synthetic construct
  source 1..20: mol_type = other RNA
tgcctgcccccggcgacact

SEQ ID NO: 2172 - RNA, 20 nt, synthetic construct
  source 1..20: mol_type = other RNA
tgcctgggccagatgggggc

SEQ ID NO: 2173 - RNA, 20 nt, synthetic construct
  source 1..20: mol_type = other RNA
tgcgacgccatccgcctcga

SEQ ID NO: 2174 - RNA, 20 nt, synthetic construct
  source 1..20: mol_type = other RNA
tgcggctgctgcaggcgccg

SEQ ID NO: 2175 - RNA, 20 nt, synthetic construct
  source 1..20: mol_type = other RNA
tgctccagcaggcgcgcggc

SEQ ID NO: 2176 - RNA, 20 nt, synthetic construct
  source 1..20: mol_type = other RNA
tgctgcagctccggcagcgc

SEQ ID NO: 2177 - RNA, 20 nt, synthetic construct
  source 1..20: mol_type = other RNA
tgctgcaggcgccggagttg

SEQ ID NO: 2178 - RNA, 20 nt, synthetic construct
  source 1..20: mol_type = other RNA
tgctggagcagatcctggtg

SEQ ID NO: 2179 - RNA, 20 nt, synthetic construct
  source 1..20: mol_type = other RNA
tgctgttgcggctgctgcag

SEQ ID NO: 2180 - RNA, 20 nt, synthetic construct
  source 1..20: mol_type = other RNA
tgcttcagcgcggacaaggc

SEQ ID NO: 2181 - RNA, 20 nt, synthetic construct
  source 1..20: mol_type = other RNA
tgcttctctccgcctacaag

SEQ ID NO: 2182 - RNA, 20 nt, synthetic construct
  source 1..20: mol_type = other RNA
tggaagacctcggccaggcc

SEQ ID NO: 2183 - RNA, 20 nt, synthetic construct
  source 1..20: mol_type = other RNA
tggagacgcgtgtgcaggcc

SEQ ID NO: 2184 - RNA, 20 nt, synthetic construct
  source 1..20: mol_type = other RNA
tggagcagatcctggtggct

SEQ ID NO: 2185 - RNA, 20 nt, synthetic construct
  source 1..20: mol_type = other RNA
tggagcgcgcgctgccggag

SEQ ID NO: 2186 - RNA, 20 nt, synthetic construct
  source 1..20: mol_type = other RNA
tggcccaggcaccgccagcc

SEQ ID NO: 2187 - RNA, 20 nt, synthetic construct
  source 1..20: mol_type = other RNA
tggccgaggtcttccaactg

SEQ ID NO: 2188 - RNA, 20 nt, synthetic construct
  source 1..20: mol_type = other RNA
tggccgcgggccccgcgaag

SEQ ID NO: 2189 - RNA, 20 nt, synthetic construct
  source 1..20: mol_type = other RNA
tggcgaagaagcgacacagc

SEQ ID NO: 2190 - RNA, 20 nt, synthetic construct
  source 1..20: mol_type = other RNA
tggcgcgctcaccggttctc

SEQ ID NO: 2191 - RNA, 20 nt, synthetic construct
  source 1..20: mol_type = other RNA
tggcggcctcgacctgctgt

SEQ ID NO: 2192 - RNA, 20 nt, synthetic construct
  source 1..20: mol_type = other RNA
tggcggtgcctgggccagat

SEQ ID NO: 2193 - RNA, 20 nt, synthetic construct
  source 1..20: mol_type = other RNA
tggcgtcgcacagaccctgg

SEQ ID NO: 2194 - RNA, 20 nt, synthetic construct
  source 1..20: mol_type = other RNA
tggctgagaaccggtgagcg

SEQ ID NO: 2195 - RNA, 20 nt, synthetic construct
  source 1..20: mol_type = other RNA
tgggccagatgggggcggtg

SEQ ID NO: 2196 - RNA, 20 nt, synthetic construct
  source 1..20: mol_type = other RNA
tgggcccgacatggcgaaga

SEQ ID NO: 2197 - RNA, 20 nt, synthetic construct
  source 1..20: mol_type = other RNA
tgggcccgtgccaccgcccc

SEQ ID NO: 2198 - RNA, 20 nt, synthetic construct
  source 1..20: mol_type = other RNA
tgggccgcgaggtagcccag

SEQ ID NO: 2199 - RNA, 20 nt, synthetic construct
  source 1..20: mol_type = other RNA
tgggcgccggcctggccgag

SEQ ID NO: 2200 - RNA, 20 nt, synthetic construct
  source 1..20: mol_type = other RNA
tgggggcggtggcacgggcc

SEQ ID NO: 2201 - RNA, 20 nt, synthetic construct
  source 1..20: mol_type = other RNA
tggtcctgacgctgcttctc

SEQ ID NO: 2202 - RNA, 20 nt, synthetic construct
  source 1..20: mol_type = other RNA
tggtggctgagaaccggtga

SEQ ID NO: 2203 - RNA, 20 nt, synthetic construct
  source 1..20: mol_type = other RNA
tgtaggcggagagaagcagc

SEQ ID NO: 2204 - RNA, 20 nt, synthetic construct
  source 1..20: mol_type = other RNA
tgtcccccgcggccccgcgc

SEQ ID NO: 2205 - RNA, 20 nt, synthetic construct
  source 1..20: mol_type = other RNA
tgtccgcgctgaagcaggcg

SEQ ID NO: 2206 - RNA, 20 nt, synthetic construct
  source 1..20: mol_type = other RNA
tgtcgccgggggcaggcacc

SEQ ID NO: 2207 - RNA, 20 nt, synthetic construct
  source 1..20: mol_type = other RNA
tgtcgcttcttcgccatgtc

SEQ ID NO: 2208 - RNA, 20 nt, synthetic construct
  source 1..20: mol_type = other RNA
tgtcgggcccacggccgggc

SEQ ID NO: 2209 - RNA, 20 nt, synthetic construct
  source 1..20: mol_type = other RNA
tgtgcaggccgcgcgcctgc

SEQ ID NO: 2210 - RNA, 20 nt, synthetic construct
  source 1..20: mol_type = other RNA
tgtgcgacgccatccgcctc

SEQ ID NO: 2211 - RNA, 20 nt, synthetic construct
  source 1..20: mol_type = other RNA
tgtgtcgcttcttcgccatg

SEQ ID NO: 2212 - RNA, 20 nt, synthetic construct
  source 1..20: mol_type = other RNA
tgttgcggctgctgcaggcg

SEQ ID NO: 2213 - RNA, 20 nt, synthetic construct
  source 1..20: mol_type = other RNA
ttcagcgcggacaaggcctg

SEQ ID NO: 2214 - RNA, 20 nt, synthetic construct
  source 1..20: mol_type = other RNA
ttccaactggtggaggaggc

SEQ ID NO: 2215 - RNA, 20 nt, synthetic construct
  source 1..20: mol_type = other RNA
ttcgccatgtcgggcccacg

SEQ ID NO: 2216 - RNA, 20 nt, synthetic construct
  source 1..20: mol_type = other RNA
ttctcagccaccaggatctg

SEQ ID NO: 2217 - RNA, 20 nt, synthetic construct
  source 1..20: mol_type = other RNA
ttctctccgcctacaagctg

SEQ ID NO: 2218 - RNA, 20 nt, synthetic construct
  source 1..20: mol_type = other RNA
ttcttcgccatgtcgggccc

SEQ ID NO: 2219 - RNA, 20 nt, synthetic construct
  source 1..20: mol_type = other RNA
ttgcggctgctgcaggcgcc

SEQ ID NO: 2220 - RNA, 20 nt, synthetic construct
  source 1..20: mol_type = other RNA
ttggaagacctcggccaggc

SEQ ID NO: 2221 - RNA, 20 nt, synthetic construct
  source 1..20: mol_type = other RNA
ttggagacgcgtgtgcaggc

SEQ ID NO: 2222 - RNA, 20 nt, synthetic construct
  source 1..20: mol_type = other RNA
ttgtaggcggagagaagcag

SEQ ID NO: 2223 - RNA, 20 nt, synthetic construct
  source 1..20: mol_type = other RNA
ttgtccgcgctgaagcaggc

SEQ ID NO: 2224 - RNA, 21 nt, synthetic construct
  source 1..21: mol_type = other RNA
aacagcaggtcgaggccgcca

SEQ ID NO: 2225 - RNA, 21 nt, synthetic construct
  source 1..21: mol_type = other RNA
aaccccggcctggcgcgctca

SEQ ID NO: 2226 - RNA, 21 nt, synthetic construct
  source 1..21: mol_type = other RNA
aaccggtgagcgcgccaggcc

SEQ ID NO: 2227 - RNA, 21 nt, synthetic construct
  source 1..21: mol_type = other RNA
aactccggcgcctgcagcagc

SEQ ID NO: 2228 - RNA, 21 nt, synthetic construct
  source 1..21: mol_type = other RNA
aagaagcgacacagcttgtag

SEQ ID NO: 2229 - RNA, 21 nt, synthetic construct
  source 1..21: mol_type = other RNA
aagacctcggccaggccggcg

SEQ ID NO: 2230 - RNA, 21 nt, synthetic construct
  source 1..21: mol_type = other RNA
aagcagcgtcaggaccatggg

SEQ ID NO: 2231 - RNA, 21 nt, synthetic construct
  source 1..21: mol_type = other RNA
aagcaggcgggcggcgcgcgg

SEQ ID NO: 2232 - RNA, 21 nt, synthetic construct
  source 1..21: mol_type = other RNA
aagcgacacagcttgtaggcg

SEQ ID NO: 2233 - RNA, 21 nt, synthetic construct
  source 1..21: mol_type = other RNA
aagctgtgtcgcttcttcgcc

SEQ ID NO: 2234 - RNA, 21 nt, synthetic construct
  source 1..21: mol_type = other RNA
aaggcctgctgcagctccggc

SEQ ID NO: 2235 - RNA, 21 nt, synthetic construct
  source 1..21: mol_type = other RNA
aagtgtcgccgggggcaggca

SEQ ID NO: 2236 - RNA, 21 nt, synthetic construct
  source 1..21: mol_type = other RNA
acaagctgtgtcgcttcttcg

SEQ ID NO: 2237 - RNA, 21 nt, synthetic construct
  source 1..21: mol_type = other RNA
acaaggcctgctgcagctccg

SEQ ID NO: 2238 - RNA, 21 nt, synthetic construct
  source 1..21: mol_type = other RNA
acacagcttgtaggcggagag

SEQ ID NO: 2239 - RNA, 21 nt, synthetic construct
  source 1..21: mol_type = other RNA
acacgcgtctccaactccggc

SEQ ID NO: 2240 - RNA, 21 nt, synthetic construct
  source 1..21: mol_type = other RNA
acagaccctgggctacctcgc

SEQ ID NO: 2241 - RNA, 21 nt, synthetic construct
  source 1..21: mol_type = other RNA
acagcaggtcgaggccgccat

SEQ ID NO: 2242 - RNA, 21 nt, synthetic construct
  source 1..21: mol_type = other RNA
acagcttgtaggcggagagaa

SEQ ID NO: 2243 - RNA, 21 nt, synthetic construct
  source 1..21: mol_type = other RNA
acatggcgaagaagcgacaca

SEQ ID NO: 2244 - RNA, 21 nt, synthetic construct
  source 1..21: mol_type = other RNA
accaggatctgctccagcagg

SEQ ID NO: 2245 - RNA, 21 nt, synthetic construct
  source 1..21: mol_type = other RNA
accagttggaagacctcggcc

SEQ ID NO: 2246 - RNA, 21 nt, synthetic construct
  source 1..21: mol_type = other RNA
accatgggcccgtgccaccgc

SEQ ID NO: 2247 - RNA, 21 nt, synthetic construct
  source 1..21: mol_type = other RNA
accccggcctggcgcgctcac

SEQ ID NO: 2248 - RNA, 21 nt, synthetic construct
  source 1..21: mol_type = other RNA
accgaggtgcaggacgccctg

SEQ ID NO: 2249 - RNA, 21 nt, synthetic construct
  source 1..21: mol_type = other RNA
accgccagccgctcggcgccc

SEQ ID NO: 2250 - RNA, 21 nt, synthetic construct
  source 1..21: mol_type = other RNA
accgcccccatctggcccagg

SEQ ID NO: 2251 - RNA, 21 nt, synthetic construct
  source 1..21: mol_type = other RNA
accggtgagcgcgccaggccg

SEQ ID NO: 2252 - RNA, 21 nt, synthetic construct
  source 1..21: mol_type = other RNA
accggttctcagccaccagga

SEQ ID NO: 2253 - RNA, 21 nt, synthetic construct
  source 1..21: mol_type = other RNA
acctcggccaggccggcgccc

SEQ ID NO: 2254 - RNA, 21 nt, synthetic construct
  source 1..21: mol_type = other RNA
acctcggtgcctgcccccggc

SEQ ID NO: 2255 - RNA, 21 nt, synthetic construct
  source 1..21: mol_type = other RNA
acctgctgttgcggctgctgc

SEQ ID NO: 2256 - RNA, 21 nt, synthetic construct
  source 1..21: mol_type = other RNA
acgccatccgcctcgatggcg

SEQ ID NO: 2257 - RNA, 21 nt, synthetic construct
  source 1..21: mol_type = other RNA
acgccctggagcgcgcgctgc

SEQ ID NO: 2258 - RNA, 21 nt, synthetic construct
  source 1..21: mol_type = other RNA
acgcgtctccaactccggcgc

SEQ ID NO: 2259 - RNA, 21 nt, synthetic construct
  source 1..21: mol_type = other RNA
acgcgtgtgcaggccgcgcgc

SEQ ID NO: 2260 - RNA, 21 nt, synthetic construct
  source 1..21: mol_type = other RNA
acgctgcttctctccgcctac

SEQ ID NO: 2261 - RNA, 21 nt, synthetic construct
  source 1..21: mol_type = other RNA
acggcccgcgcgccgcccgcc

SEQ ID NO: 2262 - RNA, 21 nt, synthetic construct
  source 1..21: mol_type = other RNA
acggccgggcgccgagcggct

SEQ ID NO: 2263 - RNA, 21 nt, synthetic construct
  source 1..21: mol_type = other RNA
actccggcgcctgcagcagcc

SEQ ID NO: 2264 - RNA, 21 nt, synthetic construct
  source 1..21: mol_type = other RNA
agaaccggtgagcgcgccagg

SEQ ID NO: 2265 - RNA, 21 nt, synthetic construct
  source 1..21: mol_type = other RNA
agaagcagcgtcaggaccatg

SEQ ID NO: 2266 - RNA, 21 nt, synthetic construct
  source 1..21: mol_type = other RNA
agaagcgacacagcttgtagg

SEQ ID NO: 2267 - RNA, 21 nt, synthetic construct
  source 1..21: mol_type = other RNA
agaccctgggctacctcgcgg

SEQ ID NO: 2268 - RNA, 21 nt, synthetic construct
  source 1..21: mol_type = other RNA
agacctcggccaggccggcgc

SEQ ID NO: 2269 - RNA, 21 nt, synthetic construct
  source 1..21: mol_type = other RNA
agacgcgtgtgcaggccgcgc

SEQ ID NO: 2270 - RNA, 21 nt, synthetic construct
  source 1..21: mol_type = other RNA
agagaagcagcgtcaggacca

SEQ ID NO: 2271 - RNA, 21 nt, synthetic construct
  source 1..21: mol_type = other RNA
agatcctggtggctgagaacc

SEQ ID NO: 2272 - RNA, 21 nt, synthetic construct
  source 1..21: mol_type = other RNA
agatgggggcggtggcacggg

SEQ ID NO: 2273 - RNA, 21 nt, synthetic construct
  source 1..21: mol_type = other RNA
agcagatcctggtggctgaga

SEQ ID NO: 2274 - RNA, 21 nt, synthetic construct
  source 1..21: mol_type = other RNA
agcagccaggcctcctccacc

SEQ ID NO: 2275 - RNA, 21 nt, synthetic construct
  source 1..21: mol_type = other RNA
agcagccgcaacagcaggtcg

SEQ ID NO: 2276 - RNA, 21 nt, synthetic construct
  source 1..21: mol_type = other RNA
agcagcgtcaggaccatgggc

SEQ ID NO: 2277 - RNA, 21 nt, synthetic construct
  source 1..21: mol_type = other RNA
agcaggccttgtccgcgctga

SEQ ID NO: 2278 - RNA, 21 nt, synthetic construct
  source 1..21: mol_type = other RNA
agcaggcgcgcggcctgcaca

SEQ ID NO: 2279 - RNA, 21 nt, synthetic construct
  source 1..21: mol_type = other RNA
agcaggcgggcggcgcgcggg

SEQ ID NO: 2280 - RNA, 21 nt, synthetic construct
  source 1..21: mol_type = other RNA
agcaggtcgaggccgccatcg

SEQ ID NO: 2281 - RNA, 21 nt, synthetic construct
  source 1..21: mol_type = other RNA
agccaccaggatctgctccag

SEQ ID NO: 2282 - RNA, 21 nt, synthetic construct
  source 1..21: mol_type = other RNA
agccaggcctcctccaccagt

SEQ ID NO: 2283 - RNA, 21 nt, synthetic construct
  source 1..21: mol_type = other RNA
agcccaccatgggcccgtgcc

SEQ ID NO: 2284 - RNA, 21 nt, synthetic construct
  source 1..21: mol_type = other RNA
agcccagggtctgtgcgacgc

SEQ ID NO: 2285 - RNA, 21 nt, synthetic construct
  source 1..21: mol_type = other RNA
agccgcaacagcaggtcgagg

SEQ ID NO: 2286 - RNA, 21 nt, synthetic construct
  source 1..21: mol_type = other RNA
agccgctcggcgcccggccgt

SEQ ID NO: 2287 - RNA, 21 nt, synthetic construct
  source 1..21: mol_type = other RNA
agcgacacagcttgtaggcgg

SEQ ID NO: 2288 - RNA, 21 nt, synthetic construct
  source 1..21: mol_type = other RNA
agcgcgcgctccagggcgtcc

SEQ ID NO: 2289 - RNA, 21 nt, synthetic construct
  source 1..21: mol_type = other RNA
agcgcgcgctgccggagctgc

SEQ ID NO: 2290 - RNA, 21 nt, synthetic construct
  source 1..21: mol_type = other RNA
agcgcggacaaggcctgctgc

SEQ ID NO: 2291 - RNA, 21 nt, synthetic construct
  source 1..21: mol_type = other RNA
agcggctggcggtgcctgggc

SEQ ID NO: 2292 - RNA, 21 nt, synthetic construct
  source 1..21: mol_type = other RNA
agcgtcaggaccatgggcgcg

SEQ ID NO: 2293 - RNA, 21 nt, synthetic construct
  source 1..21: mol_type = other RNA
agctccggcagcgcgcgctcc

SEQ ID NO: 2294 - RNA, 21 nt, synthetic construct
  source 1..21: mol_type = other RNA
agctgcagcaggccttgtccg

SEQ ID NO: 2295 - RNA, 21 nt, synthetic construct
  source 1..21: mol_type = other RNA
agctgtgtcgcttcttcgcca

SEQ ID NO: 2296 - RNA, 21 nt, synthetic construct
  source 1..21: mol_type = other RNA
agcttgtaggcggagagaagc

SEQ ID NO: 2297 - RNA, 21 nt, synthetic construct
  source 1..21: mol_type = other RNA
aggaccatgggcgcggggccg

SEQ ID NO: 2298 - RNA, 21 nt, synthetic construct
  source 1..21: mol_type = other RNA
aggacgccctggagcgcgcgc

SEQ ID NO: 2299 - RNA, 21 nt, synthetic construct
  source 1..21: mol_type = other RNA
aggatctgctccagcaggcgc

SEQ ID NO: 2300 - RNA, 21 nt, synthetic construct
  source 1..21: mol_type = other RNA
aggcaccgaggtgcaggacgc

SEQ ID NO: 2301 - RNA, 21 nt, synthetic construct
  source 1..21: mol_type = other RNA
aggcaccgccagccgctcggc

SEQ ID NO: 2302 - RNA, 21 nt, synthetic construct
  source 1..21: mol_type = other RNA
aggccgccatcgaggcggatg

SEQ ID NO: 2303 - RNA, 21 nt, synthetic construct
  source 1..21: mol_type = other RNA
aggccgcgcgcctgctggagc

SEQ ID NO: 2304 - RNA, 21 nt, synthetic construct
  source 1..21: mol_type = other RNA
aggccggcgcccacggcccgc

SEQ ID NO: 2305 - RNA, 21 nt, synthetic construct
  source 1..21: mol_type = other RNA
aggcctcctccaccagttgga

SEQ ID NO: 2306 - RNA, 21 nt, synthetic construct
  source 1..21: mol_type = other RNA
aggcctgctgcagctccggca

SEQ ID NO: 2307 - RNA, 21 nt, synthetic construct
  source 1..21: mol_type = other RNA
aggccttgtccgcgctgaagc

SEQ ID NO: 2308 - RNA, 21 nt, synthetic construct
  source 1..21: mol_type = other RNA
aggcgccggagttggagacgc

SEQ ID NO: 2309 - RNA, 21 nt, synthetic construct
  source 1..21: mol_type = other RNA
aggcgcgcggcctgcacacgc

SEQ ID NO: 2310 - RNA, 21 nt, synthetic construct
  source 1..21: mol_type = other RNA
aggcggagagaagcagcgtca

SEQ ID NO: 2311 - RNA, 21 nt, synthetic construct
  source 1..21: mol_type = other RNA
aggcggatggcgtcgcacaga

SEQ ID NO: 2312 - RNA, 21 nt, synthetic construct
  source 1..21: mol_type = other RNA
aggcgggcggcgcgcgggccg

SEQ ID NO: 2313 - RNA, 21 nt, synthetic construct
  source 1..21: mol_type = other RNA
agggcgtcctgcacctcggtg

SEQ ID NO: 2314 - RNA, 21 nt, synthetic construct
  source 1..21: mol_type = other RNA
agggtctgtgcgacgccatcc

SEQ ID NO: 2315 - RNA, 21 nt, synthetic construct
  source 1..21: mol_type = other RNA
aggtagcccagggtctgtgcg

SEQ ID NO: 2316 - RNA, 21 nt, synthetic construct
  source 1..21: mol_type = other RNA
aggtcgaggccgccatcgagg

SEQ ID NO: 2317 - RNA, 21 nt, synthetic construct
  source 1..21: mol_type = other RNA
aggtcttccaactggtggagg

SEQ ID NO: 2318 - RNA, 21 nt, synthetic construct
  source 1..21: mol_type = other RNA
aggtgcaggacgccctggagc

SEQ ID NO: 2319 - RNA, 21 nt, synthetic construct
  source 1..21: mol_type = other RNA
agtgtcgccgggggcaggcac

SEQ ID NO: 2320 - RNA, 21 nt, synthetic construct
  source 1..21: mol_type = other RNA
agttggaagacctcggccagg

SEQ ID NO: 2321 - RNA, 21 nt, synthetic construct
  source 1..21: mol_type = other RNA
agttggagacgcgtgtgcagg

SEQ ID NO: 2322 - RNA, 21 nt, synthetic construct
  source 1..21: mol_type = other RNA
atccgcctcgatggcggcctc

SEQ ID NO: 2323 - RNA, 21 nt, synthetic construct
  source 1..21: mol_type = other RNA
atcctggtggctgagaaccgg

SEQ ID NO: 2324 - RNA, 21 nt, synthetic construct
  source 1..21: mol_type = other RNA
atcgaggcggatggcgtcgca

SEQ ID NO: 2325 - RNA, 21 nt, synthetic construct
  source 1..21: mol_type = other RNA
atctgctccagcaggcgcgcg

SEQ ID NO: 2326 - RNA, 21 nt, synthetic construct
  source 1..21: mol_type = other RNA
atctggcccaggcaccgccag

SEQ ID NO: 2327 - RNA, 21 nt, synthetic construct
  source 1..21: mol_type = other RNA
atggcgaagaagcgacacagc

SEQ ID NO: 2328 - RNA, 21 nt, synthetic construct
  source 1..21: mol_type = other RNA
atggcggcctcgacctgctgt

SEQ ID NO: 2329 - RNA, 21 nt, synthetic construct
  source 1..21: mol_type = other RNA
atggcgtcgcacagaccctgg

SEQ ID NO: 2330 - RNA, 21 nt, synthetic construct
  source 1..21: mol_type = other RNA
atgggcccgtgccaccgcccc

SEQ ID NO: 2331 - RNA, 21 nt, synthetic construct
  source 1..21: mol_type = other RNA
atgggggcggtggcacgggcc

SEQ ID NO: 2332 - RNA, 21 nt, synthetic construct
  source 1..21: mol_type = other RNA
atggtcctgacgctgcttctc

SEQ ID NO: 2333 - RNA, 21 nt, synthetic construct
  source 1..21: mol_type = other RNA
atgtcccccgcggccccgcgc

SEQ ID NO: 2334 - RNA, 21 nt, synthetic construct
  source 1..21: mol_type = other RNA
atgtcgggcccacggccgggc

SEQ ID NO: 2335 - RNA, 21 nt, synthetic construct
  source 1..21: mol_type = other RNA
caacagcaggtcgaggccgcc

SEQ ID NO: 2336 - RNA, 21 nt, synthetic construct
  source 1..21: mol_type = other RNA
caaccccggcctggcgcgctc

SEQ ID NO: 2337 - RNA, 21 nt, synthetic construct
  source 1..21: mol_type = other RNA
caactccggcgcctgcagcag

SEQ ID NO: 2338 - RNA, 21 nt, synthetic construct
  source 1..21: mol_type = other RNA
caagctgtgtcgcttcttcgc

SEQ ID NO: 2339 - RNA, 21 nt, synthetic construct
  source 1..21: mol_type = other RNA
caaggcctgctgcagctccgg

SEQ ID NO: 2340 - RNA, 21 nt, synthetic construct
  source 1..21: mol_type = other RNA
cacacgcgtctccaactccgg

SEQ ID NO: 2341 - RNA, 21 nt, synthetic construct
  source 1..21: mol_type = other RNA
cacagaccctgggctacctcg

SEQ ID NO: 2342 - RNA, 21 nt, synthetic construct
  source 1..21: mol_type = other RNA
cacagcttgtaggcggagaga

SEQ ID NO: 2343 - RNA, 21 nt, synthetic construct
  source 1..21: mol_type = other RNA
caccaggatctgctccagcag

SEQ ID NO: 2344 - RNA, 21 nt, synthetic construct
  source 1..21: mol_type = other RNA
caccagttggaagacctcggc

SEQ ID NO: 2345 - RNA, 21 nt, synthetic construct
  source 1..21: mol_type = other RNA
caccatgggcccgtgccaccg

SEQ ID NO: 2346 - RNA, 21 nt, synthetic construct
  source 1..21: mol_type = other RNA
caccgaggtgcaggacgccct

SEQ ID NO: 2347 - RNA, 21 nt, synthetic construct
  source 1..21: mol_type = other RNA
caccgccagccgctcggcgcc

SEQ ID NO: 2348 - RNA, 21 nt, synthetic construct
  source 1..21: mol_type = other RNA
caccgcccccatctggcccag

SEQ ID NO: 2349 - RNA, 21 nt, synthetic construct
  source 1..21: mol_type = other RNA
caccggttctcagccaccagg

SEQ ID NO: 2350 - RNA, 21 nt, synthetic construct
  source 1..21: mol_type = other RNA
cacctcggtgcctgcccccgg

SEQ ID NO: 2351 - RNA, 21 nt, synthetic construct
  source 1..21: mol_type = other RNA
cacgcgtctccaactccggcg

SEQ ID NO: 2352 - RNA, 21 nt, synthetic construct
  source 1..21: mol_type = other RNA
cacggcccgcgcgccgcccgc

SEQ ID NO: 2353 - RNA, 21 nt, synthetic construct
  source 1..21: mol_type = other RNA
cacggccgggcgccgagcggc

SEQ ID NO: 2354 - RNA, 21 nt, synthetic construct
  source 1..21: mol_type = other RNA
cagaccctgggctacctcgcg

SEQ ID NO: 2355 - RNA, 21 nt, synthetic construct
  source 1..21: mol_type = other RNA
cagatcctggtggctgagaac

SEQ ID NO: 2356 - RNA, 21 nt, synthetic construct
  source 1..21: mol_type = other RNA
cagatgggggcggtggcacgg

SEQ ID NO: 2357 - RNA, 21 nt, synthetic construct
  source 1..21: mol_type = other RNA
cagcagccaggcctcctccac

SEQ ID NO: 2358 - RNA, 21 nt, synthetic construct
  source 1..21: mol_type = other RNA
cagcagccgcaacagcaggtc

SEQ ID NO: 2359 - RNA, 21 nt, synthetic construct
  source 1..21: mol_type = other RNA
cagcaggccttgtccgcgctg

SEQ ID NO: 2360 - RNA, 21 nt, synthetic construct
  source 1..21: mol_type = other RNA
cagcaggcgcgcggcctgcac

SEQ ID NO: 2361 - RNA, 21 nt, synthetic construct
  source 1..21: mol_type = other RNA
cagcaggtcgaggccgccatc

SEQ ID NO: 2362 - RNA, 21 nt, synthetic construct
  source 1..21: mol_type = other RNA
cagccaccaggatctgctcca

SEQ ID NO: 2363 - RNA, 21 nt, synthetic construct
  source 1..21: mol_type = other RNA
cagccaggcctcctccaccag

SEQ ID NO: 2364 - RNA, 21 nt, synthetic construct
  source 1..21: mol_type = other RNA
cagccgcaacagcaggtcgag

SEQ ID NO: 2365 - RNA, 21 nt, synthetic construct
  source 1..21: mol_type = other RNA
cagccgctcggcgcccggccg

SEQ ID NO: 2366 - RNA, 21 nt, synthetic construct
  source 1..21: mol_type = other RNA
cagcgcgcgctccagggcgtc

SEQ ID NO: 2367 - RNA, 21 nt, synthetic construct
  source 1..21: mol_type = other RNA
cagcgcggacaaggcctgctg

SEQ ID NO: 2368 - RNA, 21 nt, synthetic construct
  source 1..21: mol_type = other RNA
cagcgtcaggaccatgggcgc

SEQ ID NO: 2369 - RNA, 21 nt, synthetic construct
  source 1..21: mol_type = other RNA
cagctccggcagcgcgcgctc

SEQ ID NO: 2370 - RNA, 21 nt, synthetic construct
  source 1..21: mol_type = other RNA
cagcttgtaggcggagagaag

SEQ ID NO: 2371 - RNA, 21 nt, synthetic construct
  source 1..21: mol_type = other RNA
caggaccatgggcgcggggcc

SEQ ID NO: 2372 - RNA, 21 nt, synthetic construct
  source 1..21: mol_type = other RNA
caggacgccctggagcgcgcg

SEQ ID NO: 2373 - RNA, 21 nt, synthetic construct
  source 1..21: mol_type = other RNA
caggatctgctccagcaggcg

SEQ ID NO: 2374 - RNA, 21 nt, synthetic construct
  source 1..21: mol_type = other RNA
caggcaccgaggtgcaggacg

SEQ ID NO: 2375 - RNA, 21 nt, synthetic construct
  source 1..21: mol_type = other RNA
caggcaccgccagccgctcgg

SEQ ID NO: 2376 - RNA, 21 nt, synthetic construct
  source 1..21: mol_type = other RNA
caggccgcgcgcctgctggag

SEQ ID NO: 2377 - RNA, 21 nt, synthetic construct
  source 1..21: mol_type = other RNA
caggccggcgcccacggcccg

SEQ ID NO: 2378 - RNA, 21 nt, synthetic construct
  source 1..21: mol_type = other RNA
caggcctcctccaccagttgg

SEQ ID NO: 2379 - RNA, 21 nt, synthetic construct
  source 1..21: mol_type = other RNA
caggccttgtccgcgctgaag

SEQ ID NO: 2380 - RNA, 21 nt, synthetic construct
  source 1..21: mol_type = other RNA
caggcgccggagttggagacg

SEQ ID NO: 2381 - RNA, 21 nt, synthetic construct
  source 1..21: mol_type = other RNA
caggcgcgcggcctgcacacg

SEQ ID NO: 2382 - RNA, 21 nt, synthetic construct
  source 1..21: mol_type = other RNA
caggcgggcggcgcgcgggcc

SEQ ID NO: 2383 - RNA, 21 nt, synthetic construct
  source 1..21: mol_type = other RNA
cagggcgtcctgcacctcggt

SEQ ID NO: 2384 - RNA, 21 nt, synthetic construct
  source 1..21: mol_type = other RNA
cagggtctgtgcgacgccatc

SEQ ID NO: 2385 - RNA, 21 nt, synthetic construct
  source 1..21: mol_type = other RNA
caggtcgaggccgccatcgag

SEQ ID NO: 2386 - RNA, 21 nt, synthetic construct
  source 1..21: mol_type = other RNA
cagttggaagacctcggccag

SEQ ID NO: 2387 - RNA, 21 nt, synthetic construct
  source 1..21: mol_type = other RNA
catccgcctcgatggcggcct

SEQ ID NO: 2388 - RNA, 21 nt, synthetic construct
  source 1..21: mol_type = other RNA
catcgaggcggatggcgtcgc

SEQ ID NO: 2389 - RNA, 21 nt, synthetic construct
  source 1..21: mol_type = other RNA
catctggcccaggcaccgcca

SEQ ID NO: 2390 - RNA, 21 nt, synthetic construct
  source 1..21: mol_type = other RNA
catggcgaagaagcgacacag

SEQ ID NO: 2391 - RNA, 21 nt, synthetic construct
  source 1..21: mol_type = other RNA
catgggcccgtgccaccgccc

SEQ ID NO: 2392 - RNA, 21 nt, synthetic construct
  source 1..21: mol_type = other RNA
catggtcctgacgctgcttct

SEQ ID NO: 2393 - RNA, 21 nt, synthetic construct
  source 1..21: mol_type = other RNA
catgtcgggcccacggccggg

SEQ ID NO: 2394 - RNA, 21 nt, synthetic construct
  source 1..21: mol_type = other RNA
ccaaccccggcctggcgcgct

SEQ ID NO: 2395 - RNA, 21 nt, synthetic construct
  source 1..21: mol_type = other RNA
ccaactccggcgcctgcagca

SEQ ID NO: 2396 - RNA, 21 nt, synthetic construct
  source 1..21: mol_type = other RNA
ccaactggtggaggaggcctg

SEQ ID NO: 2397 - RNA, 21 nt, synthetic construct
  source 1..21: mol_type = other RNA
ccaccaggatctgctccagca

SEQ ID NO: 2398 - RNA, 21 nt, synthetic construct
  source 1..21: mol_type = other RNA
ccaccagttggaagacctcgg

SEQ ID NO: 2399 - RNA, 21 nt, synthetic construct
  source 1..21: mol_type = other RNA
ccaccatgggcccgtgccacc

SEQ ID NO: 2400 - RNA, 21 nt, synthetic construct
  source 1..21: mol_type = other RNA
ccaccgcccccatctggccca

SEQ ID NO: 2401 - RNA, 21 nt, synthetic construct
  source 1..21: mol_type = other RNA
ccacggcccgcgcgccgcccg

SEQ ID NO: 2402 - RNA, 21 nt, synthetic construct
  source 1..21: mol_type = other RNA
ccacggccgggcgccgagcgg

SEQ ID NO: 2403 - RNA, 21 nt, synthetic construct
  source 1..21: mol_type = other RNA
ccagatgggggcggtggcacg

SEQ ID NO: 2404 - RNA, 21 nt, synthetic construct
  source 1..21: mol_type = other RNA
ccagcaggcgcgcggcctgca

SEQ ID NO: 2405 - RNA, 21 nt, synthetic construct
  source 1..21: mol_type = other RNA
ccagccgctcggcgcccggcc

SEQ ID NO: 2406 - RNA, 21 nt, synthetic construct
  source 1..21: mol_type = other RNA
ccaggatctgctccagcaggc

SEQ ID NO: 2407 - RNA, 21 nt, synthetic construct
  source 1..21: mol_type = other RNA
ccaggcaccgccagccgctcg

SEQ ID NO: 2408 - RNA, 21 nt, synthetic construct
  source 1..21: mol_type = other RNA
ccaggccggcgcccacggccc

SEQ ID NO: 2409 - RNA, 21 nt, synthetic construct
  source 1..21: mol_type = other RNA
ccaggcctcctccaccagttg

SEQ ID NO: 2410 - RNA, 21 nt, synthetic construct
  source 1..21: mol_type = other RNA
ccagggcgtcctgcacctcgg

SEQ ID NO: 2411 - RNA, 21 nt, synthetic construct
  source 1..21: mol_type = other RNA
ccagggtctgtgcgacgccat

SEQ ID NO: 2412 - RNA, 21 nt, synthetic construct
  source 1..21: mol_type = other RNA
ccagttggaagacctcggcca

SEQ ID NO: 2413 - RNA, 21 nt, synthetic construct
  source 1..21: mol_type = other RNA
ccatccgcctcgatggcggcc

SEQ ID NO: 2414 - RNA, 21 nt, synthetic construct
  source 1..21: mol_type = other RNA
ccatcgaggcggatggcgtcg

SEQ ID NO: 2415 - RNA, 21 nt, synthetic construct
  source 1..21: mol_type = other RNA
ccatctggcccaggcaccgcc

SEQ ID NO: 2416 - RNA, 21 nt, synthetic construct
  source 1..21: mol_type = other RNA
ccatgggcccgtgccaccgcc

SEQ ID NO: 2417 - RNA, 21 nt, synthetic construct
  source 1..21: mol_type = other RNA
ccatggtcctgacgctgcttc

SEQ ID NO: 2418 - RNA, 21 nt, synthetic construct
  source 1..21: mol_type = other RNA
ccatgtcgggcccacggccgg

SEQ ID NO: 2419 - RNA, 21 nt, synthetic construct
  source 1..21: mol_type = other RNA
cccaaccccggcctggcgcgc

SEQ ID NO: 2420 - RNA, 21 nt, synthetic construct
  source 1..21: mol_type = other RNA
cccaccatgggcccgtgccac

SEQ ID NO: 2421 - RNA, 21 nt, synthetic construct
  source 1..21: mol_type = other RNA
cccacggcccgcgcgccgccc

SEQ ID NO: 2422 - RNA, 21 nt, synthetic construct
  source 1..21: mol_type = other RNA
cccacggccgggcgccgagcg

SEQ ID NO: 2423 - RNA, 21 nt, synthetic construct
  source 1..21: mol_type = other RNA
cccaggcaccgccagccgctc

SEQ ID NO: 2424 - RNA, 21 nt, synthetic construct
  source 1..21: mol_type = other RNA
cccagggtctgtgcgacgcca

SEQ ID NO: 2425 - RNA, 21 nt, synthetic construct
  source 1..21: mol_type = other RNA
cccatctggcccaggcaccgc

SEQ ID NO: 2426 - RNA, 21 nt, synthetic construct
  source 1..21: mol_type = other RNA
cccatggtcctgacgctgctt

SEQ ID NO: 2427 - RNA, 21 nt, synthetic construct
  source 1..21: mol_type = other RNA
ccccatctggcccaggcaccg

SEQ ID NO: 2428 - RNA, 21 nt, synthetic construct
  source 1..21: mol_type = other RNA
cccccatctggcccaggcacc

SEQ ID NO: 2429 - RNA, 21 nt, synthetic construct
  source 1..21: mol_type = other RNA
cccccgcggccccgcgcccat

SEQ ID NO: 2430 - RNA, 21 nt, synthetic construct
  source 1..21: mol_type = other RNA
cccccggcgacacttcgcggg

SEQ ID NO: 2431 - RNA, 21 nt, synthetic construct
  source 1..21: mol_type = other RNA
ccccgcgaagtgtcgccgggg

SEQ ID NO: 2432 - RNA, 21 nt, synthetic construct
  source 1..21: mol_type = other RNA
ccccgcgcccatggtcctgac

SEQ ID NO: 2433 - RNA, 21 nt, synthetic construct
  source 1..21: mol_type = other RNA
ccccgcggccccgcgcccatg

SEQ ID NO: 2434 - RNA, 21 nt, synthetic construct
  source 1..21: mol_type = other RNA
ccccggcctggcgcgctcacc

SEQ ID NO: 2435 - RNA, 21 nt, synthetic construct
  source 1..21: mol_type = other RNA
ccccggcgacacttcgcgggg

SEQ ID NO: 2436 - RNA, 21 nt, synthetic construct
  source 1..21: mol_type = other RNA
cccgacatggcgaagaagcga

SEQ ID NO: 2437 - RNA, 21 nt, synthetic construct
  source 1..21: mol_type = other RNA
cccgcctgcttcagcgcggac

SEQ ID NO: 2438 - RNA, 21 nt, synthetic construct
  source 1..21: mol_type = other RNA
cccgcgaagtgtcgccggggg

SEQ ID NO: 2439 - RNA, 21 nt, synthetic construct
  source 1..21: mol_type = other RNA
cccgcgcccatggtcctgacg

SEQ ID NO: 2440 - RNA, 21 nt, synthetic construct
  source 1..21: mol_type = other RNA
cccgcgcgccgcccgcctgct

SEQ ID NO: 2441 - RNA, 21 nt, synthetic construct
  source 1..21: mol_type = other RNA
cccgcggccccgcgcccatgg

SEQ ID NO: 2442 - RNA, 21 nt, synthetic construct
  source 1..21: mol_type = other RNA
cccggccgtgggcccgacatg

SEQ ID NO: 2443 - RNA, 21 nt, synthetic construct
  source 1..21: mol_type = other RNA
cccggcctggcgcgctcaccg

SEQ ID NO: 2444 - RNA, 21 nt, synthetic construct
  source 1..21: mol_type = other RNA
cccggcgacacttcgcggggc

SEQ ID NO: 2445 - RNA, 21 nt, synthetic construct
  source 1..21: mol_type = other RNA
cccgtgccaccgcccccatct

SEQ ID NO: 2446 - RNA, 21 nt, synthetic construct
  source 1..21: mol_type = other RNA
ccctggagcgcgcgctgccgg

SEQ ID NO: 2447 - RNA, 21 nt, synthetic construct
  source 1..21: mol_type = other RNA
ccgacatggcgaagaagcgac

SEQ ID NO: 2448 - RNA, 21 nt, synthetic construct
  source 1..21: mol_type = other RNA
ccgagcggctggcggtgcctg

SEQ ID NO: 2449 - RNA, 21 nt, synthetic construct
  source 1..21: mol_type = other RNA
ccgaggtcttccaactggtgg

SEQ ID NO: 2450 - RNA, 21 nt, synthetic construct
  source 1..21: mol_type = other RNA
ccgaggtgcaggacgccctgg

SEQ ID NO: 2451 - RNA, 21 nt, synthetic construct
  source 1..21: mol_type = other RNA
ccgcaacagcaggtcgaggcc

SEQ ID NO: 2452 - RNA, 21 nt, synthetic construct
  source 1..21: mol_type = other RNA
ccgccagccgctcggcgcccg

SEQ ID NO: 2453 - RNA, 21 nt, synthetic construct
  source 1..21: mol_type = other RNA
ccgccatcgaggcggatggcg

SEQ ID NO: 2454 - RNA, 21 nt, synthetic construct
  source 1..21: mol_type = other RNA
ccgcccccatctggcccaggc

SEQ ID NO: 2455 - RNA, 21 nt, synthetic construct
  source 1..21: mol_type = other RNA
ccgcccgcctgcttcagcgcg

SEQ ID NO: 2456 - RNA, 21 nt, synthetic construct
  source 1..21: mol_type = other RNA
ccgcctacaagctgtgtcgct

SEQ ID NO: 2457 - RNA, 21 nt, synthetic construct
  source 1..21: mol_type = other RNA
ccgcctcgatggcggcctcga

SEQ ID NO: 2458 - RNA, 21 nt, synthetic construct
  source 1..21: mol_type = other RNA
ccgcctgcttcagcgcggaca

SEQ ID NO: 2459 - RNA, 21 nt, synthetic construct
  source 1..21: mol_type = other RNA
ccgcgaagtgtcgccgggggc

SEQ ID NO: 2460 - RNA, 21 nt, synthetic construct
  source 1..21: mol_type = other RNA
ccgcgaggtagcccagggtct

SEQ ID NO: 2461 - RNA, 21 nt, synthetic construct
  source 1..21: mol_type = other RNA
ccgcgcccatggtcctgacgc

SEQ ID NO: 2462 - RNA, 21 nt, synthetic construct
  source 1..21: mol_type = other RNA
ccgcgcgccgcccgcctgctt

SEQ ID NO: 2463 - RNA, 21 nt, synthetic construct
  source 1..21: mol_type = other RNA
ccgcgcgcctgctggagcaga

SEQ ID NO: 2464 - RNA, 21 nt, synthetic construct
  source 1..21: mol_type = other RNA
ccgcgctgaagcaggcgggcg

SEQ ID NO: 2465 - RNA, 21 nt, synthetic construct
  source 1..21: mol_type = other RNA
ccgcggccccgcgcccatggt

SEQ ID NO: 2466 - RNA, 21 nt, synthetic construct
  source 1..21: mol_type = other RNA
ccgcgggccccgcgaagtgtc

SEQ ID NO: 2467 - RNA, 21 nt, synthetic construct
  source 1..21: mol_type = other RNA
ccgctcggcgcccggccgtgg

SEQ ID NO: 2468 - RNA, 21 nt, synthetic construct
  source 1..21: mol_type = other RNA
ccggagctgcagcaggccttg

SEQ ID NO: 2469 - RNA, 21 nt, synthetic construct
  source 1..21: mol_type = other RNA
ccggagttggagacgcgtgtg

SEQ ID NO: 2470 - RNA, 21 nt, synthetic construct
  source 1..21: mol_type = other RNA
ccggcagcgcgcgctccaggg

SEQ ID NO: 2471 - RNA, 21 nt, synthetic construct
  source 1..21: mol_type = other RNA
ccggccgtgggcccgacatgg

SEQ ID NO: 2472 - RNA, 21 nt, synthetic construct
  source 1..21: mol_type = other RNA
ccggcctggccgaggtcttcc

SEQ ID NO: 2473 - RNA, 21 nt, synthetic construct
  source 1..21: mol_type = other RNA
ccggcctggcgcgctcaccgg

SEQ ID NO: 2474 - RNA, 21 nt, synthetic construct
  source 1..21: mol_type = other RNA
ccggcgacacttcgcggggcc

SEQ ID NO: 2475 - RNA, 21 nt, synthetic construct
  source 1..21: mol_type = other RNA
ccggcgcccacggcccgcgcg

SEQ ID NO: 2476 - RNA, 21 nt, synthetic construct
  source 1..21: mol_type = other RNA
ccggcgcctgcagcagccgca

SEQ ID NO: 2477 - RNA, 21 nt, synthetic construct
  source 1..21: mol_type = other RNA
ccgggcgccgagcggctggcg

SEQ ID NO: 2478 - RNA, 21 nt, synthetic construct
  source 1..21: mol_type = other RNA
ccgggggcaggcaccgaggtg

SEQ ID NO: 2479 - RNA, 21 nt, synthetic construct
  source 1..21: mol_type = other RNA
ccggtgagcgcgccaggccgg

SEQ ID NO: 2480 - RNA, 21 nt, synthetic construct
  source 1..21: mol_type = other RNA
ccggttctcagccaccaggat

SEQ ID NO: 2481 - RNA, 21 nt, synthetic construct
  source 1..21: mol_type = other RNA
ccgtgccaccgcccccatctg

SEQ ID NO: 2482 - RNA, 21 nt, synthetic construct
  source 1..21: mol_type = other RNA
ccgtgggcccgacatggcgaa

SEQ ID NO: 2483 - RNA, 21 nt, synthetic construct
  source 1..21: mol_type = other RNA
ccgtgggccgcgaggtagccc

SEQ ID NO: 2484 - RNA, 21 nt, synthetic construct
  source 1..21: mol_type = other RNA
ccgtgggcgccggcctggccg

SEQ ID NO: 2485 - RNA, 21 nt, synthetic construct
  source 1..21: mol_type = other RNA
cctacaagctgtgtcgcttct

SEQ ID NO: 2486 - RNA, 21 nt, synthetic construct
  source 1..21: mol_type = other RNA
cctccaccagttggaagacct

SEQ ID NO: 2487 - RNA, 21 nt, synthetic construct
  source 1..21: mol_type = other RNA
cctcctccaccagttggaaga

SEQ ID NO: 2488 - RNA, 21 nt, synthetic construct
  source 1..21: mol_type = other RNA
cctcgacctgctgttgcggct

SEQ ID NO: 2489 - RNA, 21 nt, synthetic construct
  source 1..21: mol_type = other RNA
cctcgatggcggcctcgacct

SEQ ID NO: 2490 - RNA, 21 nt, synthetic construct
  source 1..21: mol_type = other RNA
cctcggccaggccggcgccca

SEQ ID NO: 2491 - RNA, 21 nt, synthetic construct
  source 1..21: mol_type = other RNA
cctcggtgcctgcccccggcg

SEQ ID NO: 2492 - RNA, 21 nt, synthetic construct
  source 1..21: mol_type = other RNA
cctgacgctgcttctctccgc

SEQ ID NO: 2493 - RNA, 21 nt, synthetic construct
  source 1..21: mol_type = other RNA
cctgcacacgcgtctccaact

SEQ ID NO: 2494 - RNA, 21 nt, synthetic construct
  source 1..21: mol_type = other RNA
cctgcacctcggtgcctgccc

SEQ ID NO: 2495 - RNA, 21 nt, synthetic construct
  source 1..21: mol_type = other RNA
cctgcagcagccgcaacagca

SEQ ID NO: 2496 - RNA, 21 nt, synthetic construct
  source 1..21: mol_type = other RNA
cctgcccccggcgacacttcg

SEQ ID NO: 2497 - RNA, 21 nt, synthetic construct
  source 1..21: mol_type = other RNA
cctgctgcagctccggcagcg

SEQ ID NO: 2498 - RNA, 21 nt, synthetic construct
  source 1..21: mol_type = other RNA
cctgctggagcagatcctggt

SEQ ID NO: 2499 - RNA, 21 nt, synthetic construct
  source 1..21: mol_type = other RNA
cctgctgttgcggctgctgca

SEQ ID NO: 2500 - RNA, 21 nt, synthetic construct
  source 1..21: mol_type = other RNA
cctgcttcagcgcggacaagg

SEQ ID NO: 2501 - RNA, 21 nt, synthetic construct
  source 1..21: mol_type = other RNA
cctggagcgcgcgctgccgga

SEQ ID NO: 2502 - RNA, 21 nt, synthetic construct
  source 1..21: mol_type = other RNA
cctggccgaggtcttccaact

SEQ ID NO: 2503 - RNA, 21 nt, synthetic construct
  source 1..21: mol_type = other RNA
cctggcgcgctcaccggttct

SEQ ID NO: 2504 - RNA, 21 nt, synthetic construct
  source 1..21: mol_type = other RNA
cctgggccagatgggggcggt

SEQ ID NO: 2505 - RNA, 21 nt, synthetic construct
  source 1..21: mol_type = other RNA
cctggtggctgagaaccggtg

SEQ ID NO: 2506 - RNA, 21 nt, synthetic construct
  source 1..21: mol_type = other RNA
ccttgtccgcgctgaagcagg

SEQ ID NO: 2507 - RNA, 21 nt, synthetic construct
  source 1..21: mol_type = other RNA
cgaagaagcgacacagcttgt

SEQ ID NO: 2508 - RNA, 21 nt, synthetic construct
  source 1..21: mol_type = other RNA
cgaagtgtcgccgggggcagg

SEQ ID NO: 2509 - RNA, 21 nt, synthetic construct
  source 1..21: mol_type = other RNA
cgacacagcttgtaggcggag

SEQ ID NO: 2510 - RNA, 21 nt, synthetic construct
  source 1..21: mol_type = other RNA
cgacacttcgcggggcccgcg

SEQ ID NO: 2511 - RNA, 21 nt, synthetic construct
  source 1..21: mol_type = other RNA
cgacatggcgaagaagcgaca

SEQ ID NO: 2512 - RNA, 21 nt, synthetic construct
  source 1..21: mol_type = other RNA
cgacctgctgttgcggctgct

SEQ ID NO: 2513 - RNA, 21 nt, synthetic construct
  source 1..21: mol_type = other RNA
cgacgccatccgcctcgatgg

SEQ ID NO: 2514 - RNA, 21 nt, synthetic construct
  source 1..21: mol_type = other RNA
cgagcggctggcggtgcctgg

SEQ ID NO: 2515 - RNA, 21 nt, synthetic construct
  source 1..21: mol_type = other RNA
cgaggccgccatcgaggcgga

SEQ ID NO: 2516 - RNA, 21 nt, synthetic construct
  source 1..21: mol_type = other RNA
cgaggcggatggcgtcgcaca

SEQ ID NO: 2517 - RNA, 21 nt, synthetic construct
  source 1..21: mol_type = other RNA
cgaggtagcccagggtctgtg

SEQ ID NO: 2518 - RNA, 21 nt, synthetic construct
  source 1..21: mol_type = other RNA
cgaggtcttccaactggtgga

SEQ ID NO: 2519 - RNA, 21 nt, synthetic construct
  source 1..21: mol_type = other RNA
cgaggtgcaggacgccctgga

SEQ ID NO: 2520 - RNA, 21 nt, synthetic construct
  source 1..21: mol_type = other RNA
cgatggcggcctcgacctgct

SEQ ID NO: 2521 - RNA, 21 nt, synthetic construct
  source 1..21: mol_type = other RNA
cgcaacagcaggtcgaggccg

SEQ ID NO: 2522 - RNA, 21 nt, synthetic construct
  source 1..21: mol_type = other RNA
cgcacagaccctgggctacct

SEQ ID NO: 2523 - RNA, 21 nt, synthetic construct
  source 1..21: mol_type = other RNA
cgccagccgctcggcgcccgg

SEQ ID NO: 2524 - RNA, 21 nt, synthetic construct
  source 1..21: mol_type = other RNA
cgccatccgcctcgatggcgg

SEQ ID NO: 2525 - RNA, 21 nt, synthetic construct
  source 1..21: mol_type = other RNA
cgccatcgaggcggatggcgt

SEQ ID NO: 2526 - RNA, 21 nt, synthetic construct
  source 1..21: mol_type = other RNA
cgccatgtcgggcccacggcc

SEQ ID NO: 2527 - RNA, 21 nt, synthetic construct
  source 1..21: mol_type = other RNA
cgcccacggcccgcgcgccgc

SEQ ID NO: 2528 - RNA, 21 nt, synthetic construct
  source 1..21: mol_type = other RNA
cgcccatggtcctgacgctgc

SEQ ID NO: 2529 - RNA, 21 nt, synthetic construct
  source 1..21: mol_type = other RNA
cgcccccatctggcccaggca

SEQ ID NO: 2530 - RNA, 21 nt, synthetic construct
  source 1..21: mol_type = other RNA
cgcccgcctgcttcagcgcgg

SEQ ID NO: 2531 - RNA, 21 nt, synthetic construct
  source 1..21: mol_type = other RNA
cgcccggccgtgggcccgaca

SEQ ID NO: 2532 - RNA, 21 nt, synthetic construct
  source 1..21: mol_type = other RNA
cgccctggagcgcgcgctgcc

SEQ ID NO: 2533 - RNA, 21 nt, synthetic construct
  source 1..21: mol_type = other RNA
cgccgagcggctggcggtgcc

SEQ ID NO: 2534 - RNA, 21 nt, synthetic construct
  source 1..21: mol_type = other RNA
cgccgcccgcctgcttcagcg

SEQ ID NO: 2535 - RNA, 21 nt, synthetic construct
  source 1..21: mol_type = other RNA
cgccggagttggagacgcgtg

SEQ ID NO: 2536 - RNA, 21 nt, synthetic construct
  source 1..21: mol_type = other RNA
cgccggcctggccgaggtctt

SEQ ID NO: 2537 - RNA, 21 nt, synthetic construct
  source 1..21: mol_type = other RNA
cgccgggggcaggcaccgagg

SEQ ID NO: 2538 - RNA, 21 nt, synthetic construct
  source 1..21: mol_type = other RNA
cgcctacaagctgtgtcgctt

SEQ ID NO: 2539 - RNA, 21 nt, synthetic construct
  source 1..21: mol_type = other RNA
cgcctcgatggcggcctcgac

SEQ ID NO: 2540 - RNA, 21 nt, synthetic construct
  source 1..21: mol_type = other RNA
cgcctgcagcagccgcaacag

SEQ ID NO: 2541 - RNA, 21 nt, synthetic construct
  source 1..21: mol_type = other RNA
cgcctgctggagcagatcctg

SEQ ID NO: 2542 - RNA, 21 nt, synthetic construct
  source 1..21: mol_type = other RNA
cgcctgcttcagcgcggacaa

SEQ ID NO: 2543 - RNA, 21 nt, synthetic construct
  source 1..21: mol_type = other RNA
cgcgaagtgtcgccgggggca

SEQ ID NO: 2544 - RNA, 21 nt, synthetic construct
  source 1..21: mol_type = other RNA
cgcgaggtagcccagggtctg

SEQ ID NO: 2545 - RNA, 21 nt, synthetic construct
  source 1..21: mol_type = other RNA
cgcgcccatggtcctgacgct

SEQ ID NO: 2546 - RNA, 21 nt, synthetic construct
  source 1..21: mol_type = other RNA
cgcgccgcccgcctgcttcag

SEQ ID NO: 2547 - RNA, 21 nt, synthetic construct
  source 1..21: mol_type = other RNA
cgcgcctgctggagcagatcc

SEQ ID NO: 2548 - RNA, 21 nt, synthetic construct
  source 1..21: mol_type = other RNA
cgcgcgccgcccgcctgcttc

SEQ ID NO: 2549 - RNA, 21 nt, synthetic construct
  source 1..21: mol_type = other RNA
cgcgcgcctgctggagcagat

SEQ ID NO: 2550 - RNA, 21 nt, synthetic construct
  source 1..21: mol_type = other RNA
cgcgcgctccagggcgtcctg

SEQ ID NO: 2551 - RNA, 21 nt, synthetic construct
  source 1..21: mol_type = other RNA
cgcgcgctgccggagctgcag

SEQ ID NO: 2552 - RNA, 21 nt, synthetic construct
  source 1..21: mol_type = other RNA
cgcgcggcctgcacacgcgtc

SEQ ID NO: 2553 - RNA, 21 nt, synthetic construct
  source 1..21: mol_type = other RNA
cgcgcgggccgtgggcgccgg

SEQ ID NO: 2554 - RNA, 21 nt, synthetic construct
  source 1..21: mol_type = other RNA
cgcgctcaccggttctcagcc

SEQ ID NO: 2555 - RNA, 21 nt, synthetic construct
  source 1..21: mol_type = other RNA
cgcgctccagggcgtcctgca

SEQ ID NO: 2556 - RNA, 21 nt, synthetic construct
  source 1..21: mol_type = other RNA
cgcgctgaagcaggcgggcgg

SEQ ID NO: 2557 - RNA, 21 nt, synthetic construct
  source 1..21: mol_type = other RNA
cgcgctgccggagctgcagca

SEQ ID NO: 2558 - RNA, 21 nt, synthetic construct
  source 1..21: mol_type = other RNA
cgcggacaaggcctgctgcag

SEQ ID NO: 2559 - RNA, 21 nt, synthetic construct
  source 1..21: mol_type = other RNA
cgcggccccgcgcccatggtc

SEQ ID NO: 2560 - RNA, 21 nt, synthetic construct
  source 1..21: mol_type = other RNA
cgcggcctgcacacgcgtctc

SEQ ID NO: 2561 - RNA, 21 nt, synthetic construct
  source 1..21: mol_type = other RNA
cgcgggccccgcgaagtgtcg

SEQ ID NO: 2562 - RNA, 21 nt, synthetic construct
  source 1..21: mol_type = other RNA
cgcgggccgtgggcgccggcc

SEQ ID NO: 2563 - RNA, 21 nt, synthetic construct
  source 1..21: mol_type = other RNA
cgcgtctccaactccggcgcc

SEQ ID NO: 2564 - RNA, 21 nt, synthetic construct
  source 1..21: mol_type = other RNA
cgcgtgtgcaggccgcgcgcc

SEQ ID NO: 2565 - RNA, 21 nt, synthetic construct
  source 1..21: mol_type = other RNA
cgctcaccggttctcagccac

SEQ ID NO: 2566 - RNA, 21 nt, synthetic construct
  source 1..21: mol_type = other RNA
cgctccagggcgtcctgcacc

SEQ ID NO: 2567 - RNA, 21 nt, synthetic construct
  source 1..21: mol_type = other RNA
cgctcggcgcccggccgtggg

SEQ ID NO: 2568 - RNA, 21 nt, synthetic construct
  source 1..21: mol_type = other RNA
cgctgaagcaggcgggcggcg

SEQ ID NO: 2569 - RNA, 21 nt, synthetic construct
  source 1..21: mol_type = other RNA
cgctgccggagctgcagcagg

SEQ ID NO: 2570 - RNA, 21 nt, synthetic construct
  source 1..21: mol_type = other RNA
cgctgcttctctccgcctaca

SEQ ID NO: 2571 - RNA, 21 nt, synthetic construct
  source 1..21: mol_type = other RNA
cgcttcttcgccatgtcgggc

SEQ ID NO: 2572 - RNA, 21 nt, synthetic construct
  source 1..21: mol_type = other RNA
cggacaaggcctgctgcagct

SEQ ID NO: 2573 - RNA, 21 nt, synthetic construct
  source 1..21: mol_type = other RNA
cggagagaagcagcgtcagga

SEQ ID NO: 2574 - RNA, 21 nt, synthetic construct
  source 1..21: mol_type = other RNA
cggagctgcagcaggccttgt

SEQ ID NO: 2575 - RNA, 21 nt, synthetic construct
  source 1..21: mol_type = other RNA
cggagttggagacgcgtgtgc

SEQ ID NO: 2576 - RNA, 21 nt, synthetic construct
  source 1..21: mol_type = other RNA
cggatggcgtcgcacagaccc

SEQ ID NO: 2577 - RNA, 21 nt, synthetic construct
  source 1..21: mol_type = other RNA
cggcagcgcgcgctccagggc

SEQ ID NO: 2578 - RNA, 21 nt, synthetic construct
  source 1..21: mol_type = other RNA
cggccaggccggcgcccacgg

SEQ ID NO: 2579 - RNA, 21 nt, synthetic construct
  source 1..21: mol_type = other RNA
cggccccgcgcccatggtcct

SEQ ID NO: 2580 - RNA, 21 nt, synthetic construct
  source 1..21: mol_type = other RNA
cggcccgcgcgccgcccgcct

SEQ ID NO: 2581 - RNA, 21 nt, synthetic construct
  source 1..21: mol_type = other RNA
cggccgggcgccgagcggctg

SEQ ID NO: 2582 - RNA, 21 nt, synthetic construct
  source 1..21: mol_type = other RNA
cggccgtgggcccgacatggc

SEQ ID NO: 2583 - RNA, 21 nt, synthetic construct
  source 1..21: mol_type = other RNA
cggcctcgacctgctgttgcg

SEQ ID NO: 2584 - RNA, 21 nt, synthetic construct
  source 1..21: mol_type = other RNA
cggcctgcacacgcgtctcca

SEQ ID NO: 2585 - RNA, 21 nt, synthetic construct
  source 1..21: mol_type = other RNA
cggcctggccgaggtcttcca

SEQ ID NO: 2586 - RNA, 21 nt, synthetic construct
  source 1..21: mol_type = other RNA
cggcctggcgcgctcaccggt

SEQ ID NO: 2587 - RNA, 21 nt, synthetic construct
  source 1..21: mol_type = other RNA
cggcgacacttcgcggggccc

SEQ ID NO: 2588 - RNA, 21 nt, synthetic construct
  source 1..21: mol_type = other RNA
cggcgcccacggcccgcgcgc

SEQ ID NO: 2589 - RNA, 21 nt, synthetic construct
  source 1..21: mol_type = other RNA
cggcgcccggccgtgggcccg

SEQ ID NO: 2590 - RNA, 21 nt, synthetic construct
  source 1..21: mol_type = other RNA
cggcgcctgcagcagccgcaa

SEQ ID NO: 2591 - RNA, 21 nt, synthetic construct
  source 1..21: mol_type = other RNA
cggcgcgcgggccgtgggcgc

SEQ ID NO: 2592 - RNA, 21 nt, synthetic construct
  source 1..21: mol_type = other RNA
cggctgctgcaggcgccggag

SEQ ID NO: 2593 - RNA, 21 nt, synthetic construct
  source 1..21: mol_type = other RNA
cggctggcggtgcctgggcca

SEQ ID NO: 2594 - RNA, 21 nt, synthetic construct
  source 1..21: mol_type = other RNA
cgggcccacggccgggcgccg

SEQ ID NO: 2595 - RNA, 21 nt, synthetic construct
  source 1..21: mol_type = other RNA
cgggccccgcgaagtgtcgcc

SEQ ID NO: 2596 - RNA, 21 nt, synthetic construct
  source 1..21: mol_type = other RNA
cgggccgtgggcgccggcctg

SEQ ID NO: 2597 - RNA, 21 nt, synthetic construct
  source 1..21: mol_type = other RNA
cgggcgccgagcggctggcgg

SEQ ID NO: 2598 - RNA, 21 nt, synthetic construct
  source 1..21: mol_type = other RNA
cgggcggcgcgcgggccgtgg

SEQ ID NO: 2599 - RNA, 21 nt, synthetic construct
  source 1..21: mol_type = other RNA
cgggggcaggcaccgaggtgc

SEQ ID NO: 2600 - RNA, 21 nt, synthetic construct
  source 1..21: mol_type = other RNA
cgggtggccgcgggccccgcg

SEQ ID NO: 2601 - RNA, 21 nt, synthetic construct
  source 1..21: mol_type = other RNA
cggtgagcgcgccaggccggg

SEQ ID NO: 2602 - RNA, 21 nt, synthetic construct
  source 1..21: mol_type = other RNA
cggtgcctgcccccggcgaca

SEQ ID NO: 2603 - RNA, 21 nt, synthetic construct
  source 1..21: mol_type = other RNA
cggtgcctgggccagatgggg

SEQ ID NO: 2604 - RNA, 21 nt, synthetic construct
  source 1..21: mol_type = other RNA
cggttctcagccaccaggatc

SEQ ID NO: 2605 - RNA, 21 nt, synthetic construct
  source 1..21: mol_type = other RNA
cgtcaggaccatgggcgcggg

SEQ ID NO: 2606 - RNA, 21 nt, synthetic construct
  source 1..21: mol_type = other RNA
cgtcctgcacctcggtgcctg

SEQ ID NO: 2607 - RNA, 21 nt, synthetic construct
  source 1..21: mol_type = other RNA
cgtcgcacagaccctgggcta

SEQ ID NO: 2608 - RNA, 21 nt, synthetic construct
  source 1..21: mol_type = other RNA
cgtctccaactccggcgcctg

SEQ ID NO: 2609 - RNA, 21 nt, synthetic construct
  source 1..21: mol_type = other RNA
cgtgccaccgcccccatctgg

SEQ ID NO: 2610 - RNA, 21 nt, synthetic construct
  source 1..21: mol_type = other RNA
cgtgggcccgacatggcgaag

SEQ ID NO: 2611 - RNA, 21 nt, synthetic construct
  source 1..21: mol_type = other RNA
cgtgggccgcgaggtagccca

SEQ ID NO: 2612 - RNA, 21 nt, synthetic construct
  source 1..21: mol_type = other RNA
cgtgggcgccggcctggccga

SEQ ID NO: 2613 - RNA, 21 nt, synthetic construct
  source 1..21: mol_type = other RNA
cgtgtgcaggccgcgcgcctg

SEQ ID NO: 2614 - RNA, 21 nt, synthetic construct
  source 1..21: mol_type = other RNA
ctacaagctgtgtcgcttctt

SEQ ID NO: 2615 - RNA, 21 nt, synthetic construct
  source 1..21: mol_type = other RNA
ctcaccggttctcagccacca

SEQ ID NO: 2616 - RNA, 21 nt, synthetic construct
  source 1..21: mol_type = other RNA
ctcagccaccaggatctgctc

SEQ ID NO: 2617 - RNA, 21 nt, synthetic construct
  source 1..21: mol_type = other RNA
ctccaactccggcgcctgcag

SEQ ID NO: 2618 - RNA, 21 nt, synthetic construct
  source 1..21: mol_type = other RNA
ctccaccagttggaagacctc

SEQ ID NO: 2619 - RNA, 21 nt, synthetic construct
  source 1..21: mol_type = other RNA
ctccagcaggcgcgcggcctg

SEQ ID NO: 2620 - RNA, 21 nt, synthetic construct
  source 1..21: mol_type = other RNA
ctccagggcgtcctgcacctc

SEQ ID NO: 2621 - RNA, 21 nt, synthetic construct
  source 1..21: mol_type = other RNA
ctcccaaccccggcctggcgc

SEQ ID NO: 2622 - RNA, 21 nt, synthetic construct
  source 1..21: mol_type = other RNA
ctccgcctacaagctgtgtcg

SEQ ID NO: 2623 - RNA, 21 nt, synthetic construct
  source 1..21: mol_type = other RNA
ctccggcagcgcgcgctccag

SEQ ID NO: 2624 - RNA, 21 nt, synthetic construct
  source 1..21: mol_type = other RNA
ctccggcgcctgcagcagccg

SEQ ID NO: 2625 - RNA, 21 nt, synthetic construct
  source 1..21: mol_type = other RNA
ctcctccaccagttggaagac

SEQ ID NO: 2626 - RNA, 21 nt, synthetic construct
  source 1..21: mol_type = other RNA
ctcgacctgctgttgcggctg

SEQ ID NO: 2627 - RNA, 21 nt, synthetic construct
  source 1..21: mol_type = other RNA
ctcgatggcggcctcgacctg

SEQ ID NO: 2628 - RNA, 21 nt, synthetic construct
  source 1..21: mol_type = other RNA
ctcggccaggccggcgcccac

SEQ ID NO: 2629 - RNA, 21 nt, synthetic construct
  source 1..21: mol_type = other RNA
ctcggcgcccggccgtgggcc

SEQ ID NO: 2630 - RNA, 21 nt, synthetic construct
  source 1..21: mol_type = other RNA
ctcggtgcctgcccccggcga

SEQ ID NO: 2631 - RNA, 21 nt, synthetic construct
  source 1..21: mol_type = other RNA
ctctcccaaccccggcctggc

SEQ ID NO: 2632 - RNA, 21 nt, synthetic construct
  source 1..21: mol_type = other RNA
ctctccgcctacaagctgtgt

SEQ ID NO: 2633 - RNA, 21 nt, synthetic construct
  source 1..21: mol_type = other RNA
ctgaagcaggcgggcggcgcg

SEQ ID NO: 2634 - RNA, 21 nt, synthetic construct
  source 1..21: mol_type = other RNA
ctgacgctgcttctctccgcc

SEQ ID NO: 2635 - RNA, 21 nt, synthetic construct
  source 1..21: mol_type = other RNA
ctgagaaccggtgagcgcgcc

SEQ ID NO: 2636 - RNA, 21 nt, synthetic construct
  source 1..21: mol_type = other RNA
ctgcacacgcgtctccaactc

SEQ ID NO: 2637 - RNA, 21 nt, synthetic construct
  source 1..21: mol_type = other RNA
ctgcacctcggtgcctgcccc

SEQ ID NO: 2638 - RNA, 21 nt, synthetic construct
  source 1..21: mol_type = other RNA
ctgcagcagccgcaacagcag

SEQ ID NO: 2639 - RNA, 21 nt, synthetic construct
  source 1..21: mol_type = other RNA
ctgcagcaggccttgtccgcg

SEQ ID NO: 2640 - RNA, 21 nt, synthetic construct
  source 1..21: mol_type = other RNA
ctgcagctccggcagcgcgcg

SEQ ID NO: 2641 - RNA, 21 nt, synthetic construct
  source 1..21: mol_type = other RNA
ctgcaggcgccggagttggag

SEQ ID NO: 2642 - RNA, 21 nt, synthetic construct
  source 1..21: mol_type = other RNA
ctgcccccggcgacacttcgc

SEQ ID NO: 2643 - RNA, 21 nt, synthetic construct
  source 1..21: mol_type = other RNA
ctgccggagctgcagcaggcc

SEQ ID NO: 2644 - RNA, 21 nt, synthetic construct
  source 1..21: mol_type = other RNA
ctgctccagcaggcgcgcggc

SEQ ID NO: 2645 - RNA, 21 nt, synthetic construct
  source 1..21: mol_type = other RNA
ctgctgcagctccggcagcgc

SEQ ID NO: 2646 - RNA, 21 nt, synthetic construct
  source 1..21: mol_type = other RNA
ctgctgcaggcgccggagttg

SEQ ID NO: 2647 - RNA, 21 nt, synthetic construct
  source 1..21: mol_type = other RNA
ctgctggagcagatcctggtg

SEQ ID NO: 2648 - RNA, 21 nt, synthetic construct
  source 1..21: mol_type = other RNA
ctgctgttgcggctgctgcag

SEQ ID NO: 2649 - RNA, 21 nt, synthetic construct
  source 1..21: mol_type = other RNA
ctgcttcagcgcggacaaggc

SEQ ID NO: 2650 - RNA, 21 nt, synthetic construct
  source 1..21: mol_type = other RNA
ctgcttctctccgcctacaag

SEQ ID NO: 2651 - RNA, 21 nt, synthetic construct
  source 1..21: mol_type = other RNA
ctggagcagatcctggtggct

SEQ ID NO: 2652 - RNA, 21 nt, synthetic construct
  source 1..21: mol_type = other RNA
ctggagcgcgcgctgccggag

SEQ ID NO: 2653 - RNA, 21 nt, synthetic construct
  source 1..21: mol_type = other RNA
ctggcccaggcaccgccagcc

SEQ ID NO: 2654 - RNA, 21 nt, synthetic construct
  source 1..21: mol_type = other RNA
ctggccgaggtcttccaactg

SEQ ID NO: 2655 - RNA, 21 nt, synthetic construct
  source 1..21: mol_type = other RNA
ctggcgcgctcaccggttctc

SEQ ID NO: 2656 - RNA, 21 nt, synthetic construct
  source 1..21: mol_type = other RNA
ctggcggtgcctgggccagat

SEQ ID NO: 2657 - RNA, 21 nt, synthetic construct
  source 1..21: mol_type = other RNA
ctgggccagatgggggcggtg

SEQ ID NO: 2658 - RNA, 21 nt, synthetic construct
  source 1..21: mol_type = other RNA
ctggtggctgagaaccggtga

SEQ ID NO: 2659 - RNA, 21 nt, synthetic construct
  source 1..21: mol_type = other RNA
ctgtgcgacgccatccgcctc

SEQ ID NO: 2660 - RNA, 21 nt, synthetic construct
  source 1..21: mol_type = other RNA
ctgtgtcgcttcttcgccatg

SEQ ID NO: 2661 - RNA, 21 nt, synthetic construct
  source 1..21: mol_type = other RNA
ctgttgcggctgctgcaggcg

SEQ ID NO: 2662 - RNA, 21 nt, synthetic construct
  source 1..21: mol_type = other RNA
cttcagcgcggacaaggcctg

SEQ ID NO: 2663 - RNA, 21 nt, synthetic construct
  source 1..21: mol_type = other RNA
cttccaactggtggaggaggc

SEQ ID NO: 2664 - RNA, 21 nt, synthetic construct
  source 1..21: mol_type = other RNA
cttcgccatgtcgggcccacg

SEQ ID NO: 2665 - RNA, 21 nt, synthetic construct
  source 1..21: mol_type = other RNA
cttctctccgcctacaagctg

SEQ ID NO: 2666 - RNA, 21 nt, synthetic construct
  source 1..21: mol_type = other RNA
cttcttcgccatgtcgggccc

SEQ ID NO: 2667 - RNA, 21 nt, synthetic construct
  source 1..21: mol_type = other RNA
cttgtaggcggagagaagcag

SEQ ID NO: 2668 - RNA, 21 nt, synthetic construct
  source 1..21: mol_type = other RNA
cttgtccgcgctgaagcaggc

SEQ ID NO: 2669 - RNA, 21 nt, synthetic construct
  source 1..21: mol_type = other RNA
gaaccggtgagcgcgccaggc

SEQ ID NO: 2670 - RNA, 21 nt, synthetic construct
  source 1..21: mol_type = other RNA
gaagaagcgacacagcttgta

SEQ ID NO: 2671 - RNA, 21 nt, synthetic construct
  source 1..21: mol_type = other RNA
gaagacctcggccaggccggc

SEQ ID NO: 2672 - RNA, 21 nt, synthetic construct
  source 1..21: mol_type = other RNA
gaagcagcgtcaggaccatgg

SEQ ID NO: 2673 - RNA, 21 nt, synthetic construct
  source 1..21: mol_type = other RNA
gaagcaggcgggcggcgcgcg

SEQ ID NO: 2674 - RNA, 21 nt, synthetic construct
  source 1..21: mol_type = other RNA
gaagcgacacagcttgtaggc

SEQ ID NO: 2675 - RNA, 21 nt, synthetic construct
  source 1..21: mol_type = other RNA
gaagtgtcgccgggggcaggc

SEQ ID NO: 2676 - RNA, 21 nt, synthetic construct
  source 1..21: mol_type = other RNA
gacaaggcctgctgcagctcc

SEQ ID NO: 2677 - RNA, 21 nt, synthetic construct
  source 1..21: mol_type = other RNA
gacacagcttgtaggcggaga

SEQ ID NO: 2678 - RNA, 21 nt, synthetic construct
  source 1..21: mol_type = other RNA
gacatggcgaagaagcgacac

SEQ ID NO: 2679 - RNA, 21 nt, synthetic construct
  source 1..21: mol_type = other RNA
gaccatgggcgcggggccgcg

SEQ ID NO: 2680 - RNA, 21 nt, synthetic construct
  source 1..21: mol_type = other RNA
gaccctgggctacctcgcggc

SEQ ID NO: 2681 - RNA, 21 nt, synthetic construct
  source 1..21: mol_type = other RNA
gacctcggccaggccggcgcc

SEQ ID NO: 2682 - RNA, 21 nt, synthetic construct
  source 1..21: mol_type = other RNA
gacctgctgttgcggctgctg

SEQ ID NO: 2683 - RNA, 21 nt, synthetic construct
  source 1..21: mol_type = other RNA
gacgccatccgcctcgatggc

SEQ ID NO: 2684 - RNA, 21 nt, synthetic construct
  source 1..21: mol_type = other RNA
gacgccctggagcgcgcgctg

SEQ ID NO: 2685 - RNA, 21 nt, synthetic construct
  source 1..21: mol_type = other RNA
gacgcgtgtgcaggccgcgcg

SEQ ID NO: 2686 - RNA, 21 nt, synthetic construct
  source 1..21: mol_type = other RNA
gacgctgcttctctccgccta

SEQ ID NO: 2687 - RNA, 21 nt, synthetic construct
  source 1..21: mol_type = other RNA
gagaaccggtgagcgcgccag

SEQ ID NO: 2688 - RNA, 21 nt, synthetic construct
  source 1..21: mol_type = other RNA
gagaagcagcgtcaggaccat

SEQ ID NO: 2689 - RNA, 21 nt, synthetic construct
  source 1..21: mol_type = other RNA
gagacgcgtgtgcaggccgcg

SEQ ID NO: 2690 - RNA, 21 nt, synthetic construct
  source 1..21: mol_type = other RNA
gagagaagcagcgtcaggacc

SEQ ID NO: 2691 - RNA, 21 nt, synthetic construct
  source 1..21: mol_type = other RNA
gagcagatcctggtggctgag

SEQ ID NO: 2692 - RNA, 21 nt, synthetic construct
  source 1..21: mol_type = other RNA
gagcgcgcgctgccggagctg

SEQ ID NO: 2693 - RNA, 21 nt, synthetic construct
  source 1..21: mol_type = other RNA
gagcggctggcggtgcctggg

SEQ ID NO: 2694 - RNA, 21 nt, synthetic construct
  source 1..21: mol_type = other RNA
gagctgcagcaggccttgtcc

SEQ ID NO: 2695 - RNA, 21 nt, synthetic construct
  source 1..21: mol_type = other RNA
gaggccgccatcgaggcggat

SEQ ID NO: 2696 - RNA, 21 nt, synthetic construct
  source 1..21: mol_type = other RNA
gaggcggatggcgtcgcacag

SEQ ID NO: 2697 - RNA, 21 nt, synthetic construct
  source 1..21: mol_type = other RNA
gaggtagcccagggtctgtgc

SEQ ID NO: 2698 - RNA, 21 nt, synthetic construct
  source 1..21: mol_type = other RNA
gaggtcttccaactggtggag

SEQ ID NO: 2699 - RNA, 21 nt, synthetic construct
  source 1..21: mol_type = other RNA
gaggtgcaggacgccctggag

SEQ ID NO: 2700 - RNA, 21 nt, synthetic construct
  source 1..21: mol_type = other RNA
gagttggagacgcgtgtgcag

SEQ ID NO: 2701 - RNA, 21 nt, synthetic construct
  source 1..21: mol_type = other RNA
gatcctggtggctgagaaccg

SEQ ID NO: 2702 - RNA, 21 nt, synthetic construct
  source 1..21: mol_type = other RNA
gatctgctccagcaggcgcgc

SEQ ID NO: 2703 - RNA, 21 nt, synthetic construct
  source 1..21: mol_type = other RNA
gatggcggcctcgacctgctg

SEQ ID NO: 2704 - RNA, 21 nt, synthetic construct
  source 1..21: mol_type = other RNA
gatggcgtcgcacagaccctg

SEQ ID NO: 2705 - RNA, 21 nt, synthetic construct
  source 1..21: mol_type = other RNA
gatgggggcggtggcacgggc

SEQ ID NO: 2706 - RNA, 21 nt, synthetic construct
  source 1..21: mol_type = other RNA
gcaacagcaggtcgaggccgc

SEQ ID NO: 2707 - RNA, 21 nt, synthetic construct
  source 1..21: mol_type = other RNA
gcacacgcgtctccaactccg

SEQ ID NO: 2708 - RNA, 21 nt, synthetic construct
  source 1..21: mol_type = other RNA
gcacagaccctgggctacctc

SEQ ID NO: 2709 - RNA, 21 nt, synthetic construct
  source 1..21: mol_type = other RNA
gcaccgaggtgcaggacgccc

SEQ ID NO: 2710 - RNA, 21 nt, synthetic construct
  source 1..21: mol_type = other RNA
gcaccgccagccgctcggcgc

SEQ ID NO: 2711 - RNA, 21 nt, synthetic construct
  source 1..21: mol_type = other RNA
gcacctcggtgcctgcccccg

SEQ ID NO: 2712 - RNA, 21 nt, synthetic construct
  source 1..21: mol_type = other RNA
gcagatcctggtggctgagaa

SEQ ID NO: 2713 - RNA, 21 nt, synthetic construct
  source 1..21: mol_type = other RNA
gcagcagccaggcctcctcca

SEQ ID NO: 2714 - RNA, 21 nt, synthetic construct
  source 1..21: mol_type = other RNA
gcagcagccgcaacagcaggt

SEQ ID NO: 2715 - RNA, 21 nt, synthetic construct
  source 1..21: mol_type = other RNA
gcagcaggccttgtccgcgct

SEQ ID NO: 2716 - RNA, 21 nt, synthetic construct
  source 1..21: mol_type = other RNA
gcagccaggcctcctccacca

SEQ ID NO: 2717 - RNA, 21 nt, synthetic construct
  source 1..21: mol_type = other RNA
gcagccgcaacagcaggtcga

SEQ ID NO: 2718 - RNA, 21 nt, synthetic construct
  source 1..21: mol_type = other RNA
gcagcgcgcgctccagggcgt

SEQ ID NO: 2719 - RNA, 21 nt, synthetic construct
  source 1..21: mol_type = other RNA
gcagcgtcaggaccatgggcg

SEQ ID NO: 2720 - RNA, 21 nt, synthetic construct
  source 1..21: mol_type = other RNA
gcagctccggcagcgcgcgct

SEQ ID NO: 2721 - RNA, 21 nt, synthetic construct
  source 1..21: mol_type = other RNA
gcaggacgccctggagcgcgc

SEQ ID NO: 2722 - RNA, 21 nt, synthetic construct
  source 1..21: mol_type = other RNA
gcaggcaccgaggtgcaggac

SEQ ID NO: 2723 - RNA, 21 nt, synthetic construct
  source 1..21: mol_type = other RNA
gcaggccgcgcgcctgctgga

SEQ ID NO: 2724 - RNA, 21 nt, synthetic construct
  source 1..21: mol_type = other RNA
gcaggccttgtccgcgctgaa

SEQ ID NO: 2725 - RNA, 21 nt, synthetic construct
  source 1..21: mol_type = other RNA
gcaggcgccggagttggagac

SEQ ID NO: 2726 - RNA, 21 nt, synthetic construct
  source 1..21: mol_type = other RNA
gcaggcgcgcggcctgcacac

SEQ ID NO: 2727 - RNA, 21 nt, synthetic construct
  source 1..21: mol_type = other RNA
gcaggcgggcggcgcgcgggc

SEQ ID NO: 2728 - RNA, 21 nt, synthetic construct
  source 1..21: mol_type = other RNA
gcaggtcgaggccgccatcga

SEQ ID NO: 2729 - RNA, 21 nt, synthetic construct
  source 1..21: mol_type = other RNA
gccaccaggatctgctccagc

SEQ ID NO: 2730 - RNA, 21 nt, synthetic construct
  source 1..21: mol_type = other RNA
gccaccgcccccatctggccc

SEQ ID NO: 2731 - RNA, 21 nt, synthetic construct
  source 1..21: mol_type = other RNA
gccagatgggggcggtggcac

SEQ ID NO: 2732 - RNA, 21 nt, synthetic construct
  source 1..21: mol_type = other RNA
gccagccgctcggcgcccggc

SEQ ID NO: 2733 - RNA, 21 nt, synthetic construct
  source 1..21: mol_type = other RNA
gccaggccggcgcccacggcc

SEQ ID NO: 2734 - RNA, 21 nt, synthetic construct
  source 1..21: mol_type = other RNA
gccaggcctcctccaccagtt

SEQ ID NO: 2735 - RNA, 21 nt, synthetic construct
  source 1..21: mol_type = other RNA
gccatccgcctcgatggcggc

SEQ ID NO: 2736 - RNA, 21 nt, synthetic construct
  source 1..21: mol_type = other RNA
gccatcgaggcggatggcgtc

SEQ ID NO: 2737 - RNA, 21 nt, synthetic construct
  source 1..21: mol_type = other RNA
gccatgtcgggcccacggccg

SEQ ID NO: 2738 - RNA, 21 nt, synthetic construct
  source 1..21: mol_type = other RNA
gcccaccatgggcccgtgcca

SEQ ID NO: 2739 - RNA, 21 nt, synthetic construct
  source 1..21: mol_type = other RNA
gcccacggcccgcgcgccgcc

SEQ ID NO: 2740 - RNA, 21 nt, synthetic construct
  source 1..21: mol_type = other RNA
gcccacggccgggcgccgagc

SEQ ID NO: 2741 - RNA, 21 nt, synthetic construct
  source 1..21: mol_type = other RNA
gcccaggcaccgccagccgct

SEQ ID NO: 2742 - RNA, 21 nt, synthetic construct
  source 1..21: mol_type = other RNA
gcccagggtctgtgcgacgcc

SEQ ID NO: 2743 - RNA, 21 nt, synthetic construct
  source 1..21: mol_type = other RNA
gcccatggtcctgacgctgct

SEQ ID NO: 2744 - RNA, 21 nt, synthetic construct
  source 1..21: mol_type = other RNA
gcccccatctggcccaggcac

SEQ ID NO: 2745 - RNA, 21 nt, synthetic construct
  source 1..21: mol_type = other RNA
gcccccggcgacacttcgcgg

SEQ ID NO: 2746 - RNA, 21 nt, synthetic construct
  source 1..21: mol_type = other RNA
gccccgcgaagtgtcgccggg

SEQ ID NO: 2747 - RNA, 21 nt, synthetic construct
  source 1..21: mol_type = other RNA
gccccgcgcccatggtcctga

SEQ ID NO: 2748 - RNA, 21 nt, synthetic construct
  source 1..21: mol_type = other RNA
gcccgacatggcgaagaagcg

SEQ ID NO: 2749 - RNA, 21 nt, synthetic construct
  source 1..21: mol_type = other RNA
gcccgcctgcttcagcgcgga

SEQ ID NO: 2750 - RNA, 21 nt, synthetic construct
  source 1..21: mol_type = other RNA
gcccgcgcgccgcccgcctgc

SEQ ID NO: 2751 - RNA, 21 nt, synthetic construct
  source 1..21: mol_type = other RNA
gcccggccgtgggcccgacat

SEQ ID NO: 2752 - RNA, 21 nt, synthetic construct
  source 1..21: mol_type = other RNA
gcccgtgccaccgcccccatc

SEQ ID NO: 2753 - RNA, 21 nt, synthetic construct
  source 1..21: mol_type = other RNA
gccctggagcgcgcgctgccg

SEQ ID NO: 2754 - RNA, 21 nt, synthetic construct
  source 1..21: mol_type = other RNA
gccgagcggctggcggtgcct

SEQ ID NO: 2755 - RNA, 21 nt, synthetic construct
  source 1..21: mol_type = other RNA
gccgaggtcttccaactggtg

SEQ ID NO: 2756 - RNA, 21 nt, synthetic construct
  source 1..21: mol_type = other RNA
gccgcaacagcaggtcgaggc

SEQ ID NO: 2757 - RNA, 21 nt, synthetic construct
  source 1..21: mol_type = other RNA
gccgccatcgaggcggatggc

SEQ ID NO: 2758 - RNA, 21 nt, synthetic construct
  source 1..21: mol_type = other RNA
gccgcccgcctgcttcagcgc

SEQ ID NO: 2759 - RNA, 21 nt, synthetic construct
  source 1..21: mol_type = other RNA
gccgcgaggtagcccagggtc

SEQ ID NO: 2760 - RNA, 21 nt, synthetic construct
  source 1..21: mol_type = other RNA
gccgcgcgcctgctggagcag

SEQ ID NO: 2761 - RNA, 21 nt, synthetic construct
  source 1..21: mol_type = other RNA
gccgcgggccccgcgaagtgt

SEQ ID NO: 2762 - RNA, 21 nt, synthetic construct
  source 1..21: mol_type = other RNA
gccgctcggcgcccggccgtg

SEQ ID NO: 2763 - RNA, 21 nt, synthetic construct
  source 1..21: mol_type = other RNA
gccggagctgcagcaggcctt

SEQ ID NO: 2764 - RNA, 21 nt, synthetic construct
  source 1..21: mol_type = other RNA
gccggagttggagacgcgtgt

SEQ ID NO: 2765 - RNA, 21 nt, synthetic construct
  source 1..21: mol_type = other RNA
gccggcctggccgaggtcttc

SEQ ID NO: 2766 - RNA, 21 nt, synthetic construct
  source 1..21: mol_type = other RNA
gccggcgcccacggcccgcgc

SEQ ID NO: 2767 - RNA, 21 nt, synthetic construct
  source 1..21: mol_type = other RNA
gccgggcgccgagcggctggc

SEQ ID NO: 2768 - RNA, 21 nt, synthetic construct
  source 1..21: mol_type = other RNA
gccgggggcaggcaccgaggt

SEQ ID NO: 2769 - RNA, 21 nt, synthetic construct
  source 1..21: mol_type = other RNA
gccgtgggcccgacatggcga

SEQ ID NO: 2770 - RNA, 21 nt, synthetic construct
  source 1..21: mol_type = other RNA
gccgtgggccgcgaggtagcc

SEQ ID NO: 2771 - RNA, 21 nt, synthetic construct
  source 1..21: mol_type = other RNA
gccgtgggcgccggcctggcc

SEQ ID NO: 2772 - RNA, 21 nt, synthetic construct
  source 1..21: mol_type = other RNA
gcctacaagctgtgtcgcttc

SEQ ID NO: 2773 - RNA, 21 nt, synthetic construct
  source 1..21: mol_type = other RNA
gcctcctccaccagttggaag

SEQ ID NO: 2774 - RNA, 21 nt, synthetic construct
  source 1..21: mol_type = other RNA
gcctcgacctgctgttgcggc

SEQ ID NO: 2775 - RNA, 21 nt, synthetic construct
  source 1..21: mol_type = other RNA
gcctcgatggcggcctcgacc

SEQ ID NO: 2776 - RNA, 21 nt, synthetic construct
  source 1..21: mol_type = other RNA
gcctgcacacgcgtctccaac

SEQ ID NO: 2777 - RNA, 21 nt, synthetic construct
  source 1..21: mol_type = other RNA
gcctgcagcagccgcaacagc

SEQ ID NO: 2778 - RNA, 21 nt, synthetic construct
  source 1..21: mol_type = other RNA
gcctgcccccggcgacacttc

SEQ ID NO: 2779 - RNA, 21 nt, synthetic construct
  source 1..21: mol_type = other RNA
gcctgctgcagctccggcagc

SEQ ID NO: 2780 - RNA, 21 nt, synthetic construct
  source 1..21: mol_type = other RNA
gcctgctggagcagatcctgg

SEQ ID NO: 2781 - RNA, 21 nt, synthetic construct
  source 1..21: mol_type = other RNA
gcctgcttcagcgcggacaag

SEQ ID NO: 2782 - RNA, 21 nt, synthetic construct
  source 1..21: mol_type = other RNA
gcctggccgaggtcttccaac

SEQ ID NO: 2783 - RNA, 21 nt, synthetic construct
  source 1..21: mol_type = other RNA
gcctggcgcgctcaccggttc

SEQ ID NO: 2784 - RNA, 21 nt, synthetic construct
  source 1..21: mol_type = other RNA
gcctgggccagatgggggcgg

SEQ ID NO: 2785 - RNA, 21 nt, synthetic construct
  source 1..21: mol_type = other RNA
gccttgtccgcgctgaagcag

SEQ ID NO: 2786 - RNA, 21 nt, synthetic construct
  source 1..21: mol_type = other RNA
gcgaagaagcgacacagcttg

SEQ ID NO: 2787 - RNA, 21 nt, synthetic construct
  source 1..21: mol_type = other RNA
gcgaagtgtcgccgggggcag

SEQ ID NO: 2788 - RNA, 21 nt, synthetic construct
  source 1..21: mol_type = other RNA
gcgacacagcttgtaggcgga

SEQ ID NO: 2789 - RNA, 21 nt, synthetic construct
  source 1..21: mol_type = other RNA
gcgacacttcgcggggcccgc

SEQ ID NO: 2790 - RNA, 21 nt, synthetic construct
  source 1..21: mol_type = other RNA
gcgacgccatccgcctcgatg

SEQ ID NO: 2791 - RNA, 21 nt, synthetic construct
  source 1..21: mol_type = other RNA
gcgaggtagcccagggtctgt

SEQ ID NO: 2792 - RNA, 21 nt, synthetic construct
  source 1..21: mol_type = other RNA
gcgcccacggcccgcgcgccg

SEQ ID NO: 2793 - RNA, 21 nt, synthetic construct
  source 1..21: mol_type = other RNA
gcgcccatggtcctgacgctg

SEQ ID NO: 2794 - RNA, 21 nt, synthetic construct
  source 1..21: mol_type = other RNA
gcgcccggccgtgggcccgac

SEQ ID NO: 2795 - RNA, 21 nt, synthetic construct
  source 1..21: mol_type = other RNA
gcgccgagcggctggcggtgc

SEQ ID NO: 2796 - RNA, 21 nt, synthetic construct
  source 1..21: mol_type = other RNA
gcgccgcccgcctgcttcagc

SEQ ID NO: 2797 - RNA, 21 nt, synthetic construct
  source 1..21: mol_type = other RNA
gcgccggagttggagacgcgt

SEQ ID NO: 2798 - RNA, 21 nt, synthetic construct
  source 1..21: mol_type = other RNA
gcgccggcctggccgaggtct

SEQ ID NO: 2799 - RNA, 21 nt, synthetic construct
  source 1..21: mol_type = other RNA
gcgcctgcagcagccgcaaca

SEQ ID NO: 2800 - RNA, 21 nt, synthetic construct
  source 1..21: mol_type = other RNA
gcgcctgctggagcagatcct

SEQ ID NO: 2801 - RNA, 21 nt, synthetic construct
  source 1..21: mol_type = other RNA
gcgcgccgcccgcctgcttca

SEQ ID NO: 2802 - RNA, 21 nt, synthetic construct
  source 1..21: mol_type = other RNA
gcgcgcctgctggagcagatc

SEQ ID NO: 2803 - RNA, 21 nt, synthetic construct
  source 1..21: mol_type = other RNA
gcgcgcgctccagggcgtcct

SEQ ID NO: 2804 - RNA, 21 nt, synthetic construct
  source 1..21: mol_type = other RNA
gcgcgcgctgccggagctgca

SEQ ID NO: 2805 - RNA, 21 nt, synthetic construct
  source 1..21: mol_type = other RNA
gcgcgcggcctgcacacgcgt

SEQ ID NO: 2806 - RNA, 21 nt, synthetic construct
  source 1..21: mol_type = other RNA
gcgcgcgggccgtgggcgccg

SEQ ID NO: 2807 - RNA, 21 nt, synthetic construct
  source 1..21: mol_type = other RNA
gcgcgctcaccggttctcagc

SEQ ID NO: 2808 - RNA, 21 nt, synthetic construct
  source 1..21: mol_type = other RNA
gcgcgctccagggcgtcctgc

SEQ ID NO: 2809 - RNA, 21 nt, synthetic construct
  source 1..21: mol_type = other RNA
gcgcgctgccggagctgcagc

SEQ ID NO: 2810 - RNA, 21 nt, synthetic construct
  source 1..21: mol_type = other RNA
gcgcggacaaggcctgctgca

SEQ ID NO: 2811 - RNA, 21 nt, synthetic construct
  source 1..21: mol_type = other RNA
gcgcggcctgcacacgcgtct

SEQ ID NO: 2812 - RNA, 21 nt, synthetic construct
  source 1..21: mol_type = other RNA
gcgcgggccgtgggcgccggc

SEQ ID NO: 2813 - RNA, 21 nt, synthetic construct
  source 1..21: mol_type = other RNA
gcgctcaccggttctcagcca

SEQ ID NO: 2814 - RNA, 21 nt, synthetic construct
  source 1..21: mol_type = other RNA
gcgctccagggcgtcctgcac

SEQ ID NO: 2815 - RNA, 21 nt, synthetic construct
  source 1..21: mol_type = other RNA
gcgctgaagcaggcgggcggc

SEQ ID NO: 2816 - RNA, 21 nt, synthetic construct
  source 1..21: mol_type = other RNA
gcgctgccggagctgcagcag

SEQ ID NO: 2817 - RNA, 21 nt, synthetic construct
  source 1..21: mol_type = other RNA
gcggacaaggcctgctgcagc

SEQ ID NO: 2818 - RNA, 21 nt, synthetic construct
  source 1..21: mol_type = other RNA
gcggagagaagcagcgtcagg

SEQ ID NO: 2819 - RNA, 21 nt, synthetic construct
  source 1..21: mol_type = other RNA
gcggatggcgtcgcacagacc

SEQ ID NO: 2820 - RNA, 21 nt, synthetic construct
  source 1..21: mol_type = other RNA
gcggccccgcgcccatggtcc

SEQ ID NO: 2821 - RNA, 21 nt, synthetic construct
  source 1..21: mol_type = other RNA
gcggcctcgacctgctgttgc

SEQ ID NO: 2822 - RNA, 21 nt, synthetic construct
  source 1..21: mol_type = other RNA
gcggcctgcacacgcgtctcc

SEQ ID NO: 2823 - RNA, 21 nt, synthetic construct
  source 1..21: mol_type = other RNA
gcggcgcgcgggccgtgggcg

SEQ ID NO: 2824 - RNA, 21 nt, synthetic construct
  source 1..21: mol_type = other RNA
gcggctgctgcaggcgccgga

SEQ ID NO: 2825 - RNA, 21 nt, synthetic construct
  source 1..21: mol_type = other RNA
gcggctggcggtgcctgggcc

SEQ ID NO: 2826 - RNA, 21 nt, synthetic construct
  source 1..21: mol_type = other RNA
gcgggccccgcgaagtgtcgc

SEQ ID NO: 2827 - RNA, 21 nt, synthetic construct
  source 1..21: mol_type = other RNA
gcgggccgtgggcgccggcct

SEQ ID NO: 2828 - RNA, 21 nt, synthetic construct
  source 1..21: mol_type = other RNA
gcgggcggcgcgcgggccgtg

SEQ ID NO: 2829 - RNA, 21 nt, synthetic construct
  source 1..21: mol_type = other RNA
gcggtgcctgggccagatggg

SEQ ID NO: 2830 - RNA, 21 nt, synthetic construct
  source 1..21: mol_type = other RNA
gcgtcaggaccatgggcgcgg

SEQ ID NO: 2831 - RNA, 21 nt, synthetic construct
  source 1..21: mol_type = other RNA
gcgtcctgcacctcggtgcct

SEQ ID NO: 2832 - RNA, 21 nt, synthetic construct
  source 1..21: mol_type = other RNA
gcgtcgcacagaccctgggct

SEQ ID NO: 2833 - RNA, 21 nt, synthetic construct
  source 1..21: mol_type = other RNA
gcgtctccaactccggcgcct

SEQ ID NO: 2834 - RNA, 21 nt, synthetic construct
  source 1..21: mol_type = other RNA
gcgtgtgcaggccgcgcgcct

SEQ ID NO: 2835 - RNA, 21 nt, synthetic construct
  source 1..21: mol_type = other RNA
gctcaccggttctcagccacc

SEQ ID NO: 2836 - RNA, 21 nt, synthetic construct
  source 1..21: mol_type = other RNA
gctccagcaggcgcgcggcct

SEQ ID NO: 2837 - RNA, 21 nt, synthetic construct
  source 1..21: mol_type = other RNA
gctccagggcgtcctgcacct

SEQ ID NO: 2838 - RNA, 21 nt, synthetic construct
  source 1..21: mol_type = other RNA
gctccggcagcgcgcgctcca

SEQ ID NO: 2839 - RNA, 21 nt, synthetic construct
  source 1..21: mol_type = other RNA
gctcggcgcccggccgtgggc

SEQ ID NO: 2840 - RNA, 21 nt, synthetic construct
  source 1..21: mol_type = other RNA
gctgaagcaggcgggcggcgc

SEQ ID NO: 2841 - RNA, 21 nt, synthetic construct
  source 1..21: mol_type = other RNA
gctgagaaccggtgagcgcgc

SEQ ID NO: 2842 - RNA, 21 nt, synthetic construct
  source 1..21: mol_type = other RNA
gctgcagcaggccttgtccgc

SEQ ID NO: 2843 - RNA, 21 nt, synthetic construct
  source 1..21: mol_type = other RNA
gctgcagctccggcagcgcgc

SEQ ID NO: 2844 - RNA, 21 nt, synthetic construct
  source 1..21: mol_type = other RNA
gctgcaggcgccggagttgga

SEQ ID NO: 2845 - RNA, 21 nt, synthetic construct
  source 1..21: mol_type = other RNA
gctgccggagctgcagcaggc

SEQ ID NO: 2846 - RNA, 21 nt, synthetic construct
  source 1..21: mol_type = other RNA
gctgctgcaggcgccggagtt

SEQ ID NO: 2847 - RNA, 21 nt, synthetic construct
  source 1..21: mol_type = other RNA
gctgcttctctccgcctacaa

SEQ ID NO: 2848 - RNA, 21 nt, synthetic construct
  source 1..21: mol_type = other RNA
gctggagcagatcctggtggc

SEQ ID NO: 2849 - RNA, 21 nt, synthetic construct
  source 1..21: mol_type = other RNA
gctggcggtgcctgggccaga

SEQ ID NO: 2850 - RNA, 21 nt, synthetic construct
  source 1..21: mol_type = other RNA
gctgtgtcgcttcttcgccat

SEQ ID NO: 2851 - RNA, 21 nt, synthetic construct
  source 1..21: mol_type = other RNA
gctgttgcggctgctgcaggc

SEQ ID NO: 2852 - RNA, 21 nt, synthetic construct
  source 1..21: mol_type = other RNA
gcttcagcgcggacaaggcct

SEQ ID NO: 2853 - RNA, 21 nt, synthetic construct
  source 1..21: mol_type = other RNA
gcttctctccgcctacaagct

SEQ ID NO: 2854 - RNA, 21 nt, synthetic construct
  source 1..21: mol_type = other RNA
gcttcttcgccatgtcgggcc

SEQ ID NO: 2855 - RNA, 21 nt, synthetic construct
  source 1..21: mol_type = other RNA
gcttgtaggcggagagaagca

SEQ ID NO: 2856 - RNA, 21 nt, synthetic construct
  source 1..21: mol_type = other RNA
ggaagacctcggccaggccgg

SEQ ID NO: 2857 - RNA, 21 nt, synthetic construct
  source 1..21: mol_type = other RNA
ggacaaggcctgctgcagctc

SEQ ID NO: 2858 - RNA, 21 nt, synthetic construct
  source 1..21: mol_type = other RNA
ggaccatgggcgcggggccgc

SEQ ID NO: 2859 - RNA, 21 nt, synthetic construct
  source 1..21: mol_type = other RNA
ggacgccctggagcgcgcgct

SEQ ID NO: 2860 - RNA, 21 nt, synthetic construct
  source 1..21: mol_type = other RNA
ggagacgcgtgtgcaggccgc

SEQ ID NO: 2861 - RNA, 21 nt, synthetic construct
  source 1..21: mol_type = other RNA
ggagagaagcagcgtcaggac

SEQ ID NO: 2862 - RNA, 21 nt, synthetic construct
  source 1..21: mol_type = other RNA
ggagcagatcctggtggctga

SEQ ID NO: 2863 - RNA, 21 nt, synthetic construct
  source 1..21: mol_type = other RNA
ggagcgcgcgctgccggagct

SEQ ID NO: 2864 - RNA, 21 nt, synthetic construct
  source 1..21: mol_type = other RNA
ggagctgcagcaggccttgtc

SEQ ID NO: 2865 - RNA, 21 nt, synthetic construct
  source 1..21: mol_type = other RNA
ggagttggagacgcgtgtgca

SEQ ID NO: 2866 - RNA, 21 nt, synthetic construct
  source 1..21: mol_type = other RNA
ggatctgctccagcaggcgcg

SEQ ID NO: 2867 - RNA, 21 nt, synthetic construct
  source 1..21: mol_type = other RNA
ggatggcgtcgcacagaccct

SEQ ID NO: 2868 - RNA, 21 nt, synthetic construct
  source 1..21: mol_type = other RNA
ggcaccgaggtgcaggacgcc

SEQ ID NO: 2869 - RNA, 21 nt, synthetic construct
  source 1..21: mol_type = other RNA
ggcaccgccagccgctcggcg

SEQ ID NO: 2870 - RNA, 21 nt, synthetic construct
  source 1..21: mol_type = other RNA
ggcagcgcgcgctccagggcg

SEQ ID NO: 2871 - RNA, 21 nt, synthetic construct
  source 1..21: mol_type = other RNA
ggcaggcaccgaggtgcagga

SEQ ID NO: 2872 - RNA, 21 nt, synthetic construct
  source 1..21: mol_type = other RNA
ggccagatgggggcggtggca

SEQ ID NO: 2873 - RNA, 21 nt, synthetic construct
  source 1..21: mol_type = other RNA
ggccaggccggcgcccacggc

SEQ ID NO: 2874 - RNA, 21 nt, synthetic construct
  source 1..21: mol_type = other RNA
ggcccacggccgggcgccgag

SEQ ID NO: 2875 - RNA, 21 nt, synthetic construct
  source 1..21: mol_type = other RNA
ggcccaggcaccgccagccgc

SEQ ID NO: 2876 - RNA, 21 nt, synthetic construct
  source 1..21: mol_type = other RNA
ggccccgcgaagtgtcgccgg

SEQ ID NO: 2877 - RNA, 21 nt, synthetic construct
  source 1..21: mol_type = other RNA
ggccccgcgcccatggtcctg

SEQ ID NO: 2878 - RNA, 21 nt, synthetic construct
  source 1..21: mol_type = other RNA
ggcccgacatggcgaagaagc

SEQ ID NO: 2879 - RNA, 21 nt, synthetic construct
  source 1..21: mol_type = other RNA
ggcccgcgcgccgcccgcctg

SEQ ID NO: 2880 - RNA, 21 nt, synthetic construct
  source 1..21: mol_type = other RNA
ggcccgtgccaccgcccccat

SEQ ID NO: 2881 - RNA, 21 nt, synthetic construct
  source 1..21: mol_type = other RNA
ggccgaggtcttccaactggt

SEQ ID NO: 2882 - RNA, 21 nt, synthetic construct
  source 1..21: mol_type = other RNA
ggccgccatcgaggcggatgg

SEQ ID NO: 2883 - RNA, 21 nt, synthetic construct
  source 1..21: mol_type = other RNA
ggccgcgaggtagcccagggt

SEQ ID NO: 2884 - RNA, 21 nt, synthetic construct
  source 1..21: mol_type = other RNA
ggccgcgcgcctgctggagca

SEQ ID NO: 2885 - RNA, 21 nt, synthetic construct
  source 1..21: mol_type = other RNA
ggccgcgggccccgcgaagtg

SEQ ID NO: 2886 - RNA, 21 nt, synthetic construct
  source 1..21: mol_type = other RNA
ggccggcgcccacggcccgcg

SEQ ID NO: 2887 - RNA, 21 nt, synthetic construct
  source 1..21: mol_type = other RNA
ggccgggcgccgagcggctgg

SEQ ID NO: 2888 - RNA, 21 nt, synthetic construct
  source 1..21: mol_type = other RNA
ggccgtgggcccgacatggcg

SEQ ID NO: 2889 - RNA, 21 nt, synthetic construct
  source 1..21: mol_type = other RNA
ggccgtgggccgcgaggtagc

SEQ ID NO: 2890 - RNA, 21 nt, synthetic construct
  source 1..21: mol_type = other RNA
ggccgtgggcgccggcctggc

SEQ ID NO: 2891 - RNA, 21 nt, synthetic construct
  source 1..21: mol_type = other RNA
ggcctcctccaccagttggaa

SEQ ID NO: 2892 - RNA, 21 nt, synthetic construct
  source 1..21: mol_type = other RNA
ggcctcgacctgctgttgcgg

SEQ ID NO: 2893 - RNA, 21 nt, synthetic construct
  source 1..21: mol_type = other RNA
ggcctgcacacgcgtctccaa

SEQ ID NO: 2894 - RNA, 21 nt, synthetic construct
  source 1..21: mol_type = other RNA
ggcctgctgcagctccggcag

SEQ ID NO: 2895 - RNA, 21 nt, synthetic construct
  source 1..21: mol_type = other RNA
ggcctggccgaggtcttccaa

SEQ ID NO: 2896 - RNA, 21 nt, synthetic construct
  source 1..21: mol_type = other RNA
ggcctggcgcgctcaccggtt

SEQ ID NO: 2897 - RNA, 21 nt, synthetic construct
  source 1..21: mol_type = other RNA
ggccttgtccgcgctgaagca

SEQ ID NO: 2898 - RNA, 21 nt, synthetic construct
  source 1..21: mol_type = other RNA
ggcgaagaagcgacacagctt

SEQ ID NO: 2899 - RNA, 21 nt, synthetic construct
  source 1..21: mol_type = other RNA
ggcgacacttcgcggggcccg

SEQ ID NO: 2900 - RNA, 21 nt, synthetic construct
  source 1..21: mol_type = other RNA
ggcgcccacggcccgcgcgcc

SEQ ID NO: 2901 - RNA, 21 nt, synthetic construct
  source 1..21: mol_type = other RNA
ggcgcccggccgtgggcccga

SEQ ID NO: 2902 - RNA, 21 nt, synthetic construct
  source 1..21: mol_type = other RNA
ggcgccgagcggctggcggtg

SEQ ID NO: 2903 - RNA, 21 nt, synthetic construct
  source 1..21: mol_type = other RNA
ggcgccggagttggagacgcg

SEQ ID NO: 2904 - RNA, 21 nt, synthetic construct
  source 1..21: mol_type = other RNA
ggcgccggcctggccgaggtc

SEQ ID NO: 2905 - RNA, 21 nt, synthetic construct
  source 1..21: mol_type = other RNA
ggcgcctgcagcagccgcaac

SEQ ID NO: 2906 - RNA, 21 nt, synthetic construct
  source 1..21: mol_type = other RNA
ggcgcgcggcctgcacacgcg

SEQ ID NO: 2907 - RNA, 21 nt, synthetic construct
  source 1..21: mol_type = other RNA
ggcgcgcgggccgtgggcgcc

SEQ ID NO: 2908 - RNA, 21 nt, synthetic construct
  source 1..21: mol_type = other RNA
ggcgcgctcaccggttctcag

SEQ ID NO: 2909 - RNA, 21 nt, synthetic construct
  source 1..21: mol_type = other RNA
ggcggagagaagcagcgtcag

SEQ ID NO: 2910 - RNA, 21 nt, synthetic construct
  source 1..21: mol_type = other RNA
ggcggatggcgtcgcacagac

SEQ ID NO: 2911 - RNA, 21 nt, synthetic construct
  source 1..21: mol_type = other RNA
ggcggcctcgacctgctgttg

SEQ ID NO: 2912 - RNA, 21 nt, synthetic construct
  source 1..21: mol_type = other RNA
ggcggcgcgcgggccgtgggc

SEQ ID NO: 2913 - RNA, 21 nt, synthetic construct
  source 1..21: mol_type = other RNA
ggcgggcggcgcgcgggccgt

SEQ ID NO: 2914 - RNA, 21 nt, synthetic construct
  source 1..21: mol_type = other RNA
ggcggtgcctgggccagatgg

SEQ ID NO: 2915 - RNA, 21 nt, synthetic construct
  source 1..21: mol_type = other RNA
ggcgtcctgcacctcggtgcc

SEQ ID NO: 2916 - RNA, 21 nt, synthetic construct
  source 1..21: mol_type = other RNA
ggcgtcgcacagaccctgggc

SEQ ID NO: 2917 - RNA, 21 nt, synthetic construct
  source 1..21: mol_type = other RNA
ggctgagaaccggtgagcgcg

SEQ ID NO: 2918 - RNA, 21 nt, synthetic construct
  source 1..21: mol_type = other RNA
ggctgctgcaggcgccggagt

SEQ ID NO: 2919 - RNA, 21 nt, synthetic construct
  source 1..21: mol_type = other RNA
ggctggcggtgcctgggccag

SEQ ID NO: 2920 - RNA, 21 nt, synthetic construct
  source 1..21: mol_type = other RNA
gggcaggcaccgaggtgcagg

SEQ ID NO: 2921 - RNA, 21 nt, synthetic construct
  source 1..21: mol_type = other RNA
gggccagatgggggcggtggc

SEQ ID NO: 2922 - RNA, 21 nt, synthetic construct
  source 1..21: mol_type = other RNA
gggcccacggccgggcgccga

SEQ ID NO: 2923 - RNA, 21 nt, synthetic construct
  source 1..21: mol_type = other RNA
gggccccgcgaagtgtcgccg

SEQ ID NO: 2924 - RNA, 21 nt, synthetic construct
  source 1..21: mol_type = other RNA
gggcccgacatggcgaagaag

SEQ ID NO: 2925 - RNA, 21 nt, synthetic construct
  source 1..21: mol_type = other RNA
gggcccgtgccaccgccccca

SEQ ID NO: 2926 - RNA, 21 nt, synthetic construct
  source 1..21: mol_type = other RNA
gggccgcgaggtagcccaggg

SEQ ID NO: 2927 - RNA, 21 nt, synthetic construct
  source 1..21: mol_type = other RNA
gggccgtgggcgccggcctgg

SEQ ID NO: 2928 - RNA, 21 nt, synthetic construct
  source 1..21: mol_type = other RNA
gggcgccgagcggctggcggt

SEQ ID NO: 2929 - RNA, 21 nt, synthetic construct
  source 1..21: mol_type = other RNA
gggcgccggcctggccgaggt

SEQ ID NO: 2930 - RNA, 21 nt, synthetic construct
  source 1..21: mol_type = other RNA
gggcggcgcgcgggccgtggg

SEQ ID NO: 2931 - RNA, 21 nt, synthetic construct
  source 1..21: mol_type = other RNA
gggcgtcctgcacctcggtgc

SEQ ID NO: 2932 - RNA, 21 nt, synthetic construct
  source 1..21: mol_type = other RNA
ggggcaggcaccgaggtgcag

SEQ ID NO: 2933 - RNA, 21 nt, synthetic construct
  source 1..21: mol_type = other RNA
ggggcggtggcacgggcccat

SEQ ID NO: 2934 - RNA, 21 nt, synthetic construct
  source 1..21: mol_type = other RNA
gggggcaggcaccgaggtgca

SEQ ID NO: 2935 - RNA, 21 nt, synthetic construct
  source 1..21: mol_type = other RNA
gggggcggtggcacgggccca

SEQ ID NO: 2936 - RNA, 21 nt, synthetic construct
  source 1..21: mol_type = other RNA
gggtctgtgcgacgccatccg

SEQ ID NO: 2937 - RNA, 21 nt, synthetic construct
  source 1..21: mol_type = other RNA
gggtggccgcgggccccgcga

SEQ ID NO: 2938 - RNA, 21 nt, synthetic construct
  source 1..21: mol_type = other RNA
ggtagcccagggtctgtgcga

SEQ ID NO: 2939 - RNA, 21 nt, synthetic construct
  source 1..21: mol_type = other RNA
ggtcctgacgctgcttctctc

SEQ ID NO: 2940 - RNA, 21 nt, synthetic construct
  source 1..21: mol_type = other RNA
ggtcgaggccgccatcgaggc

SEQ ID NO: 2941 - RNA, 21 nt, synthetic construct
  source 1..21: mol_type = other RNA
ggtctgtgcgacgccatccgc

SEQ ID NO: 2942 - RNA, 21 nt, synthetic construct
  source 1..21: mol_type = other RNA
ggtcttccaactggtggagga

SEQ ID NO: 2943 - RNA, 21 nt, synthetic construct
  source 1..21: mol_type = other RNA
ggtgagcgcgccaggccgggg

SEQ ID NO: 2944 - RNA, 21 nt, synthetic construct
  source 1..21: mol_type = other RNA
ggtgcaggacgccctggagcg

SEQ ID NO: 2945 - RNA, 21 nt, synthetic construct
  source 1..21: mol_type = other RNA
ggtgcctgcccccggcgacac

SEQ ID NO: 2946 - RNA, 21 nt, synthetic construct
  source 1..21: mol_type = other RNA
ggtgcctgggccagatggggg

SEQ ID NO: 2947 - RNA, 21 nt, synthetic construct
  source 1..21: mol_type = other RNA
ggtggccgcgggccccgcgaa

SEQ ID NO: 2948 - RNA, 21 nt, synthetic construct
  source 1..21: mol_type = other RNA
ggtggctgagaaccggtgagc

SEQ ID NO: 2949 - RNA, 21 nt, synthetic construct
  source 1..21: mol_type = other RNA
ggttctcagccaccaggatct

SEQ ID NO: 2950 - RNA, 21 nt, synthetic construct
  source 1..21: mol_type = other RNA
gtagcccagggtctgtgcgac

SEQ ID NO: 2951 - RNA, 21 nt, synthetic construct
  source 1..21: mol_type = other RNA
gtaggcggagagaagcagcgt

SEQ ID NO: 2952 - RNA, 21 nt, synthetic construct
  source 1..21: mol_type = other RNA
gtcaggaccatgggcgcgggg

SEQ ID NO: 2953 - RNA, 21 nt, synthetic construct
  source 1..21: mol_type = other RNA
gtcccccgcggccccgcgccc

SEQ ID NO: 2954 - RNA, 21 nt, synthetic construct
  source 1..21: mol_type = other RNA
gtccgcgctgaagcaggcggg

SEQ ID NO: 2955 - RNA, 21 nt, synthetic construct
  source 1..21: mol_type = other RNA
gtcctgacgctgcttctctcc

SEQ ID NO: 2956 - RNA, 21 nt, synthetic construct
  source 1..21: mol_type = other RNA
gtcctgcacctcggtgcctgc

SEQ ID NO: 2957 - RNA, 21 nt, synthetic construct
  source 1..21: mol_type = other RNA
gtcgaggccgccatcgaggcg

SEQ ID NO: 2958 - RNA, 21 nt, synthetic construct
  source 1..21: mol_type = other RNA
gtcgcacagaccctgggctac

SEQ ID NO: 2959 - RNA, 21 nt, synthetic construct
  source 1..21: mol_type = other RNA
gtcgccgggggcaggcaccga

SEQ ID NO: 2960 - RNA, 21 nt, synthetic construct
  source 1..21: mol_type = other RNA
gtcgcttcttcgccatgtcgg

SEQ ID NO: 2961 - RNA, 21 nt, synthetic construct
  source 1..21: mol_type = other RNA
gtcgggcccacggccgggcgc

SEQ ID NO: 2962 - RNA, 21 nt, synthetic construct
  source 1..21: mol_type = other RNA
gtctccaactccggcgcctgc

SEQ ID NO: 2963 - RNA, 21 nt, synthetic construct
  source 1..21: mol_type = other RNA
gtctgtgcgacgccatccgcc

SEQ ID NO: 2964 - RNA, 21 nt, synthetic construct
  source 1..21: mol_type = other RNA
gtcttccaactggtggaggag

SEQ ID NO: 2965 - RNA, 21 nt, synthetic construct
  source 1..21: mol_type = other RNA
gtgagcgcgccaggccggggt

SEQ ID NO: 2966 - RNA, 21 nt, synthetic construct
  source 1..21: mol_type = other RNA
gtgcaggacgccctggagcgc

SEQ ID NO: 2967 - RNA, 21 nt, synthetic construct
  source 1..21: mol_type = other RNA
gtgcaggccgcgcgcctgctg

SEQ ID NO: 2968 - RNA, 21 nt, synthetic construct
  source 1..21: mol_type = other RNA
gtgccaccgcccccatctggc

SEQ ID NO: 2969 - RNA, 21 nt, synthetic construct
  source 1..21: mol_type = other RNA
gtgcctgcccccggcgacact

SEQ ID NO: 2970 - RNA, 21 nt, synthetic construct
  source 1..21: mol_type = other RNA
gtgcctgggccagatgggggc

SEQ ID NO: 2971 - RNA, 21 nt, synthetic construct
  source 1..21: mol_type = other RNA
gtgcgacgccatccgcctcga

SEQ ID NO: 2972 - RNA, 21 nt, synthetic construct
  source 1..21: mol_type = other RNA
gtggccgcgggccccgcgaag

SEQ ID NO: 2973 - RNA, 21 nt, synthetic construct
  source 1..21: mol_type = other RNA
gtggctgagaaccggtgagcg

SEQ ID NO: 2974 - RNA, 21 nt, synthetic construct
  source 1..21: mol_type = other RNA
gtgggcccgacatggcgaaga

SEQ ID NO: 2975 - RNA, 21 nt, synthetic construct
  source 1..21: mol_type = other RNA
gtgggccgcgaggtagcccag

SEQ ID NO: 2976 - RNA, 21 nt, synthetic construct
  source 1..21: mol_type = other RNA
gtgggcgccggcctggccgag

SEQ ID NO: 2977 - RNA, 21 nt, synthetic construct
  source 1..21: mol_type = other RNA
gtgtcgccgggggcaggcacc

SEQ ID NO: 2978 - RNA, 21 nt, synthetic construct
  source 1..21: mol_type = other RNA
gtgtcgcttcttcgccatgtc

SEQ ID NO: 2979 - RNA, 21 nt, synthetic construct
  source 1..21: mol_type = other RNA
gtgtgcaggccgcgcgcctgc

SEQ ID NO: 2980 - RNA, 21 nt, synthetic construct
  source 1..21: mol_type = other RNA
gttctcagccaccaggatctg

SEQ ID NO: 2981 - RNA, 21 nt, synthetic construct
  source 1..21: mol_type = other RNA
gttgcggctgctgcaggcgcc

SEQ ID NO: 2982 - RNA, 21 nt, synthetic construct
  source 1..21: mol_type = other RNA
gttggaagacctcggccaggc

SEQ ID NO: 2983 - RNA, 21 nt, synthetic construct
  source 1..21: mol_type = other RNA
gttggagacgcgtgtgcaggc

SEQ ID NO: 2984 - RNA, 21 nt, synthetic construct
  source 1..21: mol_type = other RNA
tacaagctgtgtcgcttcttc

SEQ ID NO: 2985 - RNA, 21 nt, synthetic construct
  source 1..21: mol_type = other RNA
tagcccagggtctgtgcgacg

SEQ ID NO: 2986 - RNA, 21 nt, synthetic construct
  source 1..21: mol_type = other RNA
taggcggagagaagcagcgtc

SEQ ID NO: 2987 - RNA, 21 nt, synthetic construct
  source 1..21: mol_type = other RNA
tcaccggttctcagccaccag

SEQ ID NO: 2988 - RNA, 21 nt, synthetic construct
  source 1..21: mol_type = other RNA
tcagccaccaggatctgctcc

SEQ ID NO: 2989 - RNA, 21 nt, synthetic construct
  source 1..21: mol_type = other RNA
tcagcgcggacaaggcctgct

SEQ ID NO: 2990 - RNA, 21 nt, synthetic construct
  source 1..21: mol_type = other RNA
tcaggaccatgggcgcggggc

SEQ ID NO: 2991 - RNA, 21 nt, synthetic construct
  source 1..21: mol_type = other RNA
tccaactccggcgcctgcagc

SEQ ID NO: 2992 - RNA, 21 nt, synthetic construct
  source 1..21: mol_type = other RNA
tccaactggtggaggaggcct

SEQ ID NO: 2993 - RNA, 21 nt, synthetic construct
  source 1..21: mol_type = other RNA
tccaccagttggaagacctcg

SEQ ID NO: 2994 - RNA, 21 nt, synthetic construct
  source 1..21: mol_type = other RNA
tccagcaggcgcgcggcctgc

SEQ ID NO: 2995 - RNA, 21 nt, synthetic construct
  source 1..21: mol_type = other RNA
tccagggcgtcctgcacctcg

SEQ ID NO: 2996 - RNA, 21 nt, synthetic construct
  source 1..21: mol_type = other RNA
tcccaaccccggcctggcgcg

SEQ ID NO: 2997 - RNA, 21 nt, synthetic construct
  source 1..21: mol_type = other RNA
tcccccgcggccccgcgccca

SEQ ID NO: 2998 - RNA, 21 nt, synthetic construct
  source 1..21: mol_type = other RNA
tccgcctacaagctgtgtcgc

SEQ ID NO: 2999 - RNA, 21 nt, synthetic construct
  source 1..21: mol_type = other RNA
tccgcctcgatggcggcctcg

SEQ ID NO: 3000 - RNA, 21 nt, synthetic construct
  source 1..21: mol_type = other RNA
tccgcgctgaagcaggcgggc

SEQ ID NO: 3001 - RNA, 21 nt, synthetic construct
  source 1..21: mol_type = other RNA
tccggcagcgcgcgctccagg

SEQ ID NO: 3002 - RNA, 21 nt, synthetic construct
  source 1..21: mol_type = other RNA
tccggcgcctgcagcagccgc

SEQ ID NO: 3003 - RNA, 21 nt, synthetic construct
  source 1..21: mol_type = other RNA
tcctccaccagttggaagacc

SEQ ID NO: 3004 - RNA, 21 nt, synthetic construct
  source 1..21: mol_type = other RNA
tcctgacgctgcttctctccg

SEQ ID NO: 3005 - RNA, 21 nt, synthetic construct
  source 1..21: mol_type = other RNA
tcctgcacctcggtgcctgcc

SEQ ID NO: 3006 - RNA, 21 nt, synthetic construct
  source 1..21: mol_type = other RNA
tcctggtggctgagaaccggt

SEQ ID NO: 3007 - RNA, 21 nt, synthetic construct
  source 1..21: mol_type = other RNA
tcgacctgctgttgcggctgc

SEQ ID NO: 3008 - RNA, 21 nt, synthetic construct
  source 1..21: mol_type = other RNA
tcgaggccgccatcgaggcgg

SEQ ID NO: 3009 - RNA, 21 nt, synthetic construct
  source 1..21: mol_type = other RNA
tcgaggcggatggcgtcgcac

SEQ ID NO: 3010 - RNA, 21 nt, synthetic construct
  source 1..21: mol_type = other RNA
tcgatggcggcctcgacctgc

SEQ ID NO: 3011 - RNA, 21 nt, synthetic construct
  source 1..21: mol_type = other RNA
tcgcacagaccctgggctacc

SEQ ID NO: 3012 - RNA, 21 nt, synthetic construct
  source 1..21: mol_type = other RNA
tcgccatgtcgggcccacggc

SEQ ID NO: 3013 - RNA, 21 nt, synthetic construct
  source 1..21: mol_type = other RNA
tcgccgggggcaggcaccgag

SEQ ID NO: 3014 - RNA, 21 nt, synthetic construct
  source 1..21: mol_type = other RNA
tcgcttcttcgccatgtcggg

SEQ ID NO: 3015 - RNA, 21 nt, synthetic construct
  source 1..21: mol_type = other RNA
tcggccaggccggcgcccacg

SEQ ID NO: 3016 - RNA, 21 nt, synthetic construct
  source 1..21: mol_type = other RNA
tcggcgcccggccgtgggccc

SEQ ID NO: 3017 - RNA, 21 nt, synthetic construct
  source 1..21: mol_type = other RNA
tcgggcccacggccgggcgcc

SEQ ID NO: 3018 - RNA, 21 nt, synthetic construct
  source 1..21: mol_type = other RNA
tcggtgcctgcccccggcgac

SEQ ID NO: 3019 - RNA, 21 nt, synthetic construct
  source 1..21: mol_type = other RNA
tctcagccaccaggatctgct

SEQ ID NO: 3020 - RNA, 21 nt, synthetic construct
  source 1..21: mol_type = other RNA
tctccaactccggcgcctgca

SEQ ID NO: 3021 - RNA, 21 nt, synthetic construct
  source 1..21: mol_type = other RNA
tctcccaaccccggcctggcg

SEQ ID NO: 3022 - RNA, 21 nt, synthetic construct
  source 1..21: mol_type = other RNA
tctccgcctacaagctgtgtc

SEQ ID NO: 3023 - RNA, 21 nt, synthetic construct
  source 1..21: mol_type = other RNA
tctctccgcctacaagctgtg

SEQ ID NO: 3024 - RNA, 21 nt, synthetic construct
  source 1..21: mol_type = other RNA
tctgctccagcaggcgcgcgg

SEQ ID NO: 3025 - RNA, 21 nt, synthetic construct
  source 1..21: mol_type = other RNA
tctggcccaggcaccgccagc

SEQ ID NO: 3026 - RNA, 21 nt, synthetic construct
  source 1..21: mol_type = other RNA
tctgtgcgacgccatccgcct

SEQ ID NO: 3027 - RNA, 21 nt, synthetic construct
  source 1..21: mol_type = other RNA
tcttccaactggtggaggagg

SEQ ID NO: 3028 - RNA, 21 nt, synthetic construct
  source 1..21: mol_type = other RNA
tcttcgccatgtcgggcccac

SEQ ID NO: 3029 - RNA, 21 nt, synthetic construct
  source 1..21: mol_type = other RNA
tgaagcaggcgggcggcgcgc

SEQ ID NO: 3030 - RNA, 21 nt, synthetic construct
  source 1..21: mol_type = other RNA
tgacgctgcttctctccgcct

SEQ ID NO: 3031 - RNA, 21 nt, synthetic construct
  source 1..21: mol_type = other RNA
tgagaaccggtgagcgcgcca

SEQ ID NO: 3032 - RNA, 21 nt, synthetic construct
  source 1..21: mol_type = other RNA
tgcacacgcgtctccaactcc

SEQ ID NO: 3033 - RNA, 21 nt, synthetic construct
  source 1..21: mol_type = other RNA
tgcacctcggtgcctgccccc

SEQ ID NO: 3034 - RNA, 21 nt, synthetic construct
  source 1..21: mol_type = other RNA
tgcagcagccgcaacagcagg

SEQ ID NO: 3035 - RNA, 21 nt, synthetic construct
  source 1..21: mol_type = other RNA
tgcagcaggccttgtccgcgc

SEQ ID NO: 3036 - RNA, 21 nt, synthetic construct
  source 1..21: mol_type = other RNA
tgcagctccggcagcgcgcgc

SEQ ID NO: 3037 - RNA, 21 nt, synthetic construct
  source 1..21: mol_type = other RNA
tgcaggacgccctggagcgcg

SEQ ID NO: 3038 - RNA, 21 nt, synthetic construct
  source 1..21: mol_type = other RNA
tgcaggccgcgcgcctgctgg

SEQ ID NO: 3039 - RNA, 21 nt, synthetic construct
  source 1..21: mol_type = other RNA
tgcaggcgccggagttggaga

SEQ ID NO: 3040 - RNA, 21 nt, synthetic construct
  source 1..21: mol_type = other RNA
tgccaccgcccccatctggcc

SEQ ID NO: 3041 - RNA, 21 nt, synthetic construct
  source 1..21: mol_type = other RNA
tgcccccggcgacacttcgcg

SEQ ID NO: 3042 - RNA, 21 nt, synthetic construct
  source 1..21: mol_type = other RNA
tgccggagctgcagcaggcct

SEQ ID NO: 3043 - RNA, 21 nt, synthetic construct
  source 1..21: mol_type = other RNA
tgcctgcccccggcgacactt

SEQ ID NO: 3044 - RNA, 21 nt, synthetic construct
  source 1..21: mol_type = other RNA
tgcctgggccagatgggggcg

SEQ ID NO: 3045 - RNA, 21 nt, synthetic construct
  source 1..21: mol_type = other RNA
tgcgacgccatccgcctcgat

SEQ ID NO: 3046 - RNA, 21 nt, synthetic construct
  source 1..21: mol_type = other RNA
tgcggctgctgcaggcgccgg

SEQ ID NO: 3047 - RNA, 21 nt, synthetic construct
  source 1..21: mol_type = other RNA
tgctccagcaggcgcgcggcc

SEQ ID NO: 3048 - RNA, 21 nt, synthetic construct
  source 1..21: mol_type = other RNA
tgctgcagctccggcagcgcg

SEQ ID NO: 3049 - RNA, 21 nt, synthetic construct
  source 1..21: mol_type = other RNA
tgctgcaggcgccggagttgg

SEQ ID NO: 3050 - RNA, 21 nt, synthetic construct
  source 1..21: mol_type = other RNA
tgctggagcagatcctggtgg

SEQ ID NO: 3051 - RNA, 21 nt, synthetic construct
  source 1..21: mol_type = other RNA
tgctgttgcggctgctgcagg

SEQ ID NO: 3052 - RNA, 21 nt, synthetic construct
  source 1..21: mol_type = other RNA
tgcttcagcgcggacaaggcc

SEQ ID NO: 3053 - RNA, 21 nt, synthetic construct
  source 1..21: mol_type = other RNA
tgcttctctccgcctacaagc

SEQ ID NO: 3054 - RNA, 21 nt, synthetic construct
  source 1..21: mol_type = other RNA
tggaagacctcggccaggccg

SEQ ID NO: 3055 - RNA, 21 nt, synthetic construct
  source 1..21: mol_type = other RNA
tggagacgcgtgtgcaggccg

SEQ ID NO: 3056 - RNA, 21 nt, synthetic construct
  source 1..21: mol_type = other RNA
tggagcagatcctggtggctg

SEQ ID NO: 3057 - RNA, 21 nt, synthetic construct
  source 1..21: mol_type = other RNA
tggagcgcgcgctgccggagc

SEQ ID NO: 3058 - RNA, 21 nt, synthetic construct
  source 1..21: mol_type = other RNA
tggcccaggcaccgccagccg

SEQ ID NO: 3059 - RNA, 21 nt, synthetic construct
  source 1..21: mol_type = other RNA
tggccgaggtcttccaactgg

SEQ ID NO: 3060 - RNA, 21 nt, synthetic construct
  source 1..21: mol_type = other RNA
tggccgcgggccccgcgaagt

SEQ ID NO: 3061 - RNA, 21 nt, synthetic construct
  source 1..21: mol_type = other RNA
tggcgaagaagcgacacagct

SEQ ID NO: 3062 - RNA, 21 nt, synthetic construct
  source 1..21: mol_type = other RNA
tggcgcgctcaccggttctca

SEQ ID NO: 3063 - RNA, 21 nt, synthetic construct
  source 1..21: mol_type = other RNA
tggcggcctcgacctgctgtt

SEQ ID NO: 3064 - RNA, 21 nt, synthetic construct
  source 1..21: mol_type = other RNA
tggcggtgcctgggccagatg

SEQ ID NO: 3065 - RNA, 21 nt, synthetic construct
  source 1..21: mol_type = other RNA
tggcgtcgcacagaccctggg

SEQ ID NO: 3066 - RNA, 21 nt, synthetic construct
  source 1..21: mol_type = other RNA
tggctgagaaccggtgagcgc

SEQ ID NO: 3067 - RNA, 21 nt, synthetic construct
  source 1..21: mol_type = other RNA
tgggccagatgggggcggtgg

SEQ ID NO: 3068 - RNA, 21 nt, synthetic construct
  source 1..21: mol_type = other RNA
tgggcccgacatggcgaagaa

SEQ ID NO: 3069 - RNA, 21 nt, synthetic construct
  source 1..21: mol_type = other RNA
tgggcccgtgccaccgccccc

SEQ ID NO: 3070 - RNA, 21 nt, synthetic construct
  source 1..21: mol_type = other RNA
tgggccgcgaggtagcccagg

SEQ ID NO: 3071 - RNA, 21 nt, synthetic construct
  source 1..21: mol_type = other RNA
tgggcgccggcctggccgagg

SEQ ID NO: 3072 - RNA, 21 nt, synthetic construct
  source 1..21: mol_type = other RNA
tgggggcggtggcacgggccc

SEQ ID NO: 3073 - RNA, 21 nt, synthetic construct
  source 1..21: mol_type = other RNA
tggtcctgacgctgcttctct

SEQ ID NO: 3074 - RNA, 21 nt, synthetic construct
  source 1..21: mol_type = other RNA
tggtggctgagaaccggtgag

SEQ ID NO: 3075 - RNA, 21 nt, synthetic construct
  source 1..21: mol_type = other RNA
tgtaggcggagagaagcagcg

SEQ ID NO: 3076 - RNA, 21 nt, synthetic construct
  source 1..21: mol_type = other RNA
tgtcccccgcggccccgcgcc

SEQ ID NO: 3077 - RNA, 21 nt, synthetic construct
  source 1..21: mol_type = other RNA
tgtccgcgctgaagcaggcgg

SEQ ID NO: 3078 - RNA, 21 nt, synthetic construct
  source 1..21: mol_type = other RNA
tgtcgccgggggcaggcaccg

SEQ ID NO: 3079 - RNA, 21 nt, synthetic construct
  source 1..21: mol_type = other RNA
tgtcgcttcttcgccatgtcg

SEQ ID NO: 3080 - RNA, 21 nt, synthetic construct
  source 1..21: mol_type = other RNA
tgtcgggcccacggccgggcg

SEQ ID NO: 3081 - RNA, 21 nt, synthetic construct
  source 1..21: mol_type = other RNA
tgtgcaggccgcgcgcctgct

SEQ ID NO: 3082 - RNA, 21 nt, synthetic construct
  source 1..21: mol_type = other RNA
tgtgcgacgccatccgcctcg

SEQ ID NO: 3083 - RNA, 21 nt, synthetic construct
  source 1..21: mol_type = other RNA
tgtgtcgcttcttcgccatgt

SEQ ID NO: 3084 - RNA, 21 nt, synthetic construct
  source 1..21: mol_type = other RNA
tgttgcggctgctgcaggcgc

SEQ ID NO: 3085 - RNA, 21 nt, synthetic construct
  source 1..21: mol_type = other RNA
ttcagcgcggacaaggcctgc

SEQ ID NO: 3086 - RNA, 21 nt, synthetic construct
  source 1..21: mol_type = other RNA
ttccaactggtggaggaggcc

SEQ ID NO: 3087 - RNA, 21 nt, synthetic construct
  source 1..21: mol_type = other RNA
ttcgccatgtcgggcccacgg

SEQ ID NO: 3088 - RNA, 21 nt, synthetic construct
  source 1..21: mol_type = other RNA
ttctcagccaccaggatctgc

SEQ ID NO: 3089 - RNA, 21 nt, synthetic construct
  source 1..21: mol_type = other RNA
ttctctccgcctacaagctgt

SEQ ID NO: 3090 - RNA, 21 nt, synthetic construct
  source 1..21: mol_type = other RNA
ttcttcgccatgtcgggccca

SEQ ID NO: 3091 - RNA, 21 nt, synthetic construct
  source 1..21: mol_type = other RNA
ttgcggctgctgcaggcgccg

SEQ ID NO: 3092 - RNA, 21 nt, synthetic construct
  source 1..21: mol_type = other RNA
ttggaagacctcggccaggcc

SEQ ID NO: 3093 - RNA, 21 nt, synthetic construct
  source 1..21: mol_type = other RNA
ttggagacgcgtgtgcaggcc

SEQ ID NO: 3094 - RNA, 21 nt, synthetic construct
  source 1..21: mol_type = other RNA
ttgtaggcggagagaagcagc

SEQ ID NO: 3095 - RNA, 21 nt, synthetic construct
  source 1..21: mol_type = other RNA
ttgtccgcgctgaagcaggcg

SEQ ID NO: 3096 - RNA, 22 nt, synthetic construct
  source 1..22: mol_type = other RNA
aacagcaggtcgaggccgccat

SEQ ID NO: 3097 - RNA, 22 nt, synthetic construct
  source 1..22: mol_type = other RNA
aaccccggcctggcgcgctcac

SEQ ID NO: 3098 - RNA, 22 nt, synthetic construct
  source 1..22: mol_type = other RNA
aaccggtgagcgcgccaggccg

SEQ ID NO: 3099 - RNA, 22 nt, synthetic construct
  source 1..22: mol_type = other RNA
aactccggcgcctgcagcagcc

SEQ ID NO: 3100 - RNA, 22 nt, synthetic construct
  source 1..22: mol_type = other RNA
aagaagcgacacagcttgtagg

SEQ ID NO: 3101 - RNA, 22 nt, synthetic construct
  source 1..22: mol_type = other RNA
aagacctcggccaggccggcgc

SEQ ID NO: 3102 - RNA, 22 nt, synthetic construct
  source 1..22: mol_type = other RNA
aagcagcgtcaggaccatgggc

SEQ ID NO: 3103 - RNA, 22 nt, synthetic construct
  source 1..22: mol_type = other RNA
aagcaggcgggcggcgcgcggg

SEQ ID NO: 3104 - RNA, 22 nt, synthetic construct
  source 1..22: mol_type = other RNA
aagcgacacagcttgtaggcgg

SEQ ID NO: 3105 - RNA, 22 nt, synthetic construct
  source 1..22: mol_type = other RNA
aagctgtgtcgcttcttcgcca

SEQ ID NO: 3106 - RNA, 22 nt, synthetic construct
  source 1..22: mol_type = other RNA
aaggcctgctgcagctccggca

SEQ ID NO: 3107 - RNA, 22 nt, synthetic construct
  source 1..22: mol_type = other RNA
aagtgtcgccgggggcaggcac

SEQ ID NO: 3108 - RNA, 22 nt, synthetic construct
  source 1..22: mol_type = other RNA
acaagctgtgtcgcttcttcgc

SEQ ID NO: 3109 - RNA, 22 nt, synthetic construct
  source 1..22: mol_type = other RNA
acaaggcctgctgcagctccgg

SEQ ID NO: 3110 - RNA, 22 nt, synthetic construct
  source 1..22: mol_type = other RNA
acacagcttgtaggcggagaga

SEQ ID NO: 3111 - RNA, 22 nt, synthetic construct
  source 1..22: mol_type = other RNA
acacgcgtctccaactccggcg

SEQ ID NO: 3112 - RNA, 22 nt, synthetic construct
  source 1..22: mol_type = other RNA
acagaccctgggctacctcgcg

SEQ ID NO: 3113 - RNA, 22 nt, synthetic construct
  source 1..22: mol_type = other RNA
acagcaggtcgaggccgccatc

SEQ ID NO: 3114 - RNA, 22 nt, synthetic construct
  source 1..22: mol_type = other RNA
acagcttgtaggcggagagaag

SEQ ID NO: 3115 - RNA, 22 nt, synthetic construct
  source 1..22: mol_type = other RNA
acatggcgaagaagcgacacag

SEQ ID NO: 3116 - RNA, 22 nt, synthetic construct
  source 1..22: mol_type = other RNA
accaggatctgctccagcaggc

SEQ ID NO: 3117 - RNA, 22 nt, synthetic construct
  source 1..22: mol_type = other RNA
accagttggaagacctcggcca

SEQ ID NO: 3118 - RNA, 22 nt, synthetic construct
  source 1..22: mol_type = other RNA
accatgggcccgtgccaccgcc

SEQ ID NO: 3119 - RNA, 22 nt, synthetic construct
  source 1..22: mol_type = other RNA
accccggcctggcgcgctcacc

SEQ ID NO: 3120 - RNA, 22 nt, synthetic construct
  source 1..22: mol_type = other RNA
accgaggtgcaggacgccctgg

SEQ ID NO: 3121 - RNA, 22 nt, synthetic construct
  source 1..22: mol_type = other RNA
accgccagccgctcggcgcccg

SEQ ID NO: 3122 - RNA, 22 nt, synthetic construct
  source 1..22: mol_type = other RNA
accgcccccatctggcccaggc

SEQ ID NO: 3123 - RNA, 22 nt, synthetic construct
  source 1..22: mol_type = other RNA
accggtgagcgcgccaggccgg

SEQ ID NO: 3124 - RNA, 22 nt, synthetic construct
  source 1..22: mol_type = other RNA
accggttctcagccaccaggat

SEQ ID NO: 3125 - RNA, 22 nt, synthetic construct
  source 1..22: mol_type = other RNA
acctcggccaggccggcgccca

SEQ ID NO: 3126 - RNA, 22 nt, synthetic construct
  source 1..22: mol_type = other RNA
acctcggtgcctgcccccggcg

SEQ ID NO: 3127 - RNA, 22 nt, synthetic construct
  source 1..22: mol_type = other RNA
acctgctgttgcggctgctgca

SEQ ID NO: 3128 - RNA, 22 nt, synthetic construct
  source 1..22: mol_type = other RNA
acgccatccgcctcgatggcgg

SEQ ID NO: 3129 - RNA, 22 nt, synthetic construct
  source 1..22: mol_type = other RNA
acgccctggagcgcgcgctgcc

SEQ ID NO: 3130 - RNA, 22 nt, synthetic construct
  source 1..22: mol_type = other RNA
acgcgtctccaactccggcgcc

SEQ ID NO: 3131 - RNA, 22 nt, synthetic construct
  source 1..22: mol_type = other RNA
acgcgtgtgcaggccgcgcgcc

SEQ ID NO: 3132 - RNA, 22 nt, synthetic construct
  source 1..22: mol_type = other RNA
acgctgcttctctccgcctaca

SEQ ID NO: 3133 - RNA, 22 nt, synthetic construct
  source 1..22: mol_type = other RNA
acggcccgcgcgccgcccgcct

SEQ ID NO: 3134 - RNA, 22 nt, synthetic construct
  source 1..22: mol_type = other RNA
acggccgggcgccgagcggctg

SEQ ID NO: 3135 - RNA, 22 nt, synthetic construct
  source 1..22: mol_type = other RNA
actccggcgcctgcagcagccg

SEQ ID NO: 3136 - RNA, 22 nt, synthetic construct
  source 1..22: mol_type = other RNA
agaaccggtgagcgcgccaggc

SEQ ID NO: 3137 - RNA, 22 nt, synthetic construct
  source 1..22: mol_type = other RNA
agaagcagcgtcaggaccatgg

SEQ ID NO: 3138 - RNA, 22 nt, synthetic construct
  source 1..22: mol_type = other RNA
agaagcgacacagcttgtaggc

SEQ ID NO: 3139 - RNA, 22 nt, synthetic construct
  source 1..22: mol_type = other RNA
agaccctgggctacctcgcggc

SEQ ID NO: 3140 - RNA, 22 nt, synthetic construct
  source 1..22: mol_type = other RNA
agacctcggccaggccggcgcc

SEQ ID NO: 3141 - RNA, 22 nt, synthetic construct
  source 1..22: mol_type = other RNA
agacgcgtgtgcaggccgcgcg

SEQ ID NO: 3142 - RNA, 22 nt, synthetic construct
  source 1..22: mol_type = other RNA
agagaagcagcgtcaggaccat

SEQ ID NO: 3143 - RNA, 22 nt, synthetic construct
  source 1..22: mol_type = other RNA
agatcctggtggctgagaaccg

SEQ ID NO: 3144 - RNA, 22 nt, synthetic construct
  source 1..22: mol_type = other RNA
agatgggggcggtggcacgggc

SEQ ID NO: 3145 - RNA, 22 nt, synthetic construct
  source 1..22: mol_type = other RNA
agcagatcctggtggctgagaa

SEQ ID NO: 3146 - RNA, 22 nt, synthetic construct
  source 1..22: mol_type = other RNA
agcagccaggcctcctccacca

SEQ ID NO: 3147 - RNA, 22 nt, synthetic construct
  source 1..22: mol_type = other RNA
agcagccgcaacagcaggtcga

SEQ ID NO: 3148 - RNA, 22 nt, synthetic construct
  source 1..22: mol_type = other RNA
agcagcgtcaggaccatgggcg

SEQ ID NO: 3149 - RNA, 22 nt, synthetic construct
  source 1..22: mol_type = other RNA
agcaggccttgtccgcgctgaa

SEQ ID NO: 3150 - RNA, 22 nt, synthetic construct
  source 1..22: mol_type = other RNA
agcaggcgcgcggcctgcacac

SEQ ID NO: 3151 - RNA, 22 nt, synthetic construct
  source 1..22: mol_type = other RNA
agcaggcgggcggcgcgcgggc

SEQ ID NO: 3152 - RNA, 22 nt, synthetic construct
  source 1..22: mol_type = other RNA
agcaggtcgaggccgccatcga

SEQ ID NO: 3153 - RNA, 22 nt, synthetic construct
  source 1..22: mol_type = other RNA
agccaccaggatctgctccagc

SEQ ID NO: 3154 - RNA, 22 nt, synthetic construct
  source 1..22: mol_type = other RNA
agccaggcctcctccaccagtt

SEQ ID NO: 3155 - RNA, 22 nt, synthetic construct
  source 1..22: mol_type = other RNA
agcccaccatgggcccgtgcca

SEQ ID NO: 3156 - RNA, 22 nt, synthetic construct
  source 1..22: mol_type = other RNA
agcccagggtctgtgcgacgcc

SEQ ID NO: 3157 - RNA, 22 nt, synthetic construct
  source 1..22: mol_type = other RNA
agccgcaacagcaggtcgaggc

SEQ ID NO: 3158 - RNA, 22 nt, synthetic construct
  source 1..22: mol_type = other RNA
agccgctcggcgcccggccgtg

SEQ ID NO: 3159 - RNA, 22 nt, synthetic construct
  source 1..22: mol_type = other RNA
agcgacacagcttgtaggcgga

SEQ ID NO: 3160 - RNA, 22 nt, synthetic construct
  source 1..22: mol_type = other RNA
agcgcgcgctccagggcgtcct

SEQ ID NO: 3161 - RNA, 22 nt, synthetic construct
  source 1..22: mol_type = other RNA
agcgcgcgctgccggagctgca

SEQ ID NO: 3162 - RNA, 22 nt, synthetic construct
  source 1..22: mol_type = other RNA
agcgcggacaaggcctgctgca

SEQ ID NO: 3163 - RNA, 22 nt, synthetic construct
  source 1..22: mol_type = other RNA
agcggctggcggtgcctgggcc

SEQ ID NO: 3164 - RNA, 22 nt, synthetic construct
  source 1..22: mol_type = other RNA
agcgtcaggaccatgggcgcgg

SEQ ID NO: 3165 - RNA, 22 nt, synthetic construct
  source 1..22: mol_type = other RNA
agctccggcagcgcgcgctcca

SEQ ID NO: 3166 - RNA, 22 nt, synthetic construct
  source 1..22: mol_type = other RNA
agctgcagcaggccttgtccgc

SEQ ID NO: 3167 - RNA, 22 nt, synthetic construct
  source 1..22: mol_type = other RNA
agctgtgtcgcttcttcgccat

SEQ ID NO: 3168 - RNA, 22 nt, synthetic construct
  source 1..22: mol_type = other RNA
agcttgtaggcggagagaagca

SEQ ID NO: 3169 - RNA, 22 nt, synthetic construct
  source 1..22: mol_type = other RNA
aggaccatgggcgcggggccgc

SEQ ID NO: 3170 - RNA, 22 nt, synthetic construct
  source 1..22: mol_type = other RNA
aggacgccctggagcgcgcgct

SEQ ID NO: 3171 - RNA, 22 nt, synthetic construct
  source 1..22: mol_type = other RNA
aggatctgctccagcaggcgcg

SEQ ID NO: 3172 - RNA, 22 nt, synthetic construct
  source 1..22: mol_type = other RNA
aggcaccgaggtgcaggacgcc

SEQ ID NO: 3173 - RNA, 22 nt, synthetic construct
  source 1..22: mol_type = other RNA
aggcaccgccagccgctcggcg

SEQ ID NO: 3174 - RNA, 22 nt, synthetic construct
  source 1..22: mol_type = other RNA
aggccgccatcgaggcggatgg

SEQ ID NO: 3175 - RNA, 22 nt, synthetic construct
  source 1..22: mol_type = other RNA
aggccgcgcgcctgctggagca

SEQ ID NO: 3176 - RNA, 22 nt, synthetic construct
  source 1..22: mol_type = other RNA
aggccggcgcccacggcccgcg

SEQ ID NO: 3177 - RNA, 22 nt, synthetic construct
  source 1..22: mol_type = other RNA
aggcctcctccaccagttggaa

SEQ ID NO: 3178 - RNA, 22 nt, synthetic construct
  source 1..22: mol_type = other RNA
aggcctgctgcagctccggcag

SEQ ID NO: 3179 - RNA, 22 nt, synthetic construct
  source 1..22: mol_type = other RNA
aggccttgtccgcgctgaagca

SEQ ID NO: 3180 - RNA, 22 nt, synthetic construct
  source 1..22: mol_type = other RNA
aggcgccggagttggagacgcg

SEQ ID NO: 3181 - RNA, 22 nt, synthetic construct
  source 1..22: mol_type = other RNA
aggcgcgcggcctgcacacgcg

SEQ ID NO: 3182 - RNA, 22 nt, synthetic construct
  source 1..22: mol_type = other RNA
aggcggagagaagcagcgtcag

SEQ ID NO: 3183 - RNA, 22 nt, synthetic construct
  source 1..22: mol_type = other RNA
aggcggatggcgtcgcacagac

SEQ ID NO: 3184 - RNA, 22 nt, synthetic construct
  source 1..22: mol_type = other RNA
aggcgggcggcgcgcgggccgt

SEQ ID NO: 3185 - RNA, 22 nt, synthetic construct
  source 1..22: mol_type = other RNA
agggcgtcctgcacctcggtgc

SEQ ID NO: 3186 - RNA, 22 nt, synthetic construct
  source 1..22: mol_type = other RNA
agggtctgtgcgacgccatccg

SEQ ID NO: 3187 - RNA, 22 nt, synthetic construct
  source 1..22: mol_type = other RNA
aggtagcccagggtctgtgcga

SEQ ID NO: 3188 - RNA, 22 nt, synthetic construct
  source 1..22: mol_type = other RNA
aggtcgaggccgccatcgaggc

SEQ ID NO: 3189 - RNA, 22 nt, synthetic construct
  source 1..22: mol_type = other RNA
aggtcttccaactggtggagga

SEQ ID NO: 3190 - RNA, 22 nt, synthetic construct
  source 1..22: mol_type = other RNA
aggtgcaggacgccctggagcg

SEQ ID NO: 3191 - RNA, 22 nt, synthetic construct
  source 1..22: mol_type = other RNA
agtgtcgccgggggcaggcacc

SEQ ID NO: 3192 - RNA, 22 nt, synthetic construct
  source 1..22: mol_type = other RNA
agttggaagacctcggccaggc

SEQ ID NO: 3193 - RNA, 22 nt, synthetic construct
  source 1..22: mol_type = other RNA
agttggagacgcgtgtgcaggc

SEQ ID NO: 3194 - RNA, 22 nt, synthetic construct
  source 1..22: mol_type = other RNA
atccgcctcgatggcggcctcg

SEQ ID NO: 3195 - RNA, 22 nt, synthetic construct
  source 1..22: mol_type = other RNA
atcctggtggctgagaaccggt

SEQ ID NO: 3196 - RNA, 22 nt, synthetic construct
  source 1..22: mol_type = other RNA
atcgaggcggatggcgtcgcac

SEQ ID NO: 3197 - RNA, 22 nt, synthetic construct
  source 1..22: mol_type = other RNA
atctgctccagcaggcgcgcgg

SEQ ID NO: 3198 - RNA, 22 nt, synthetic construct
  source 1..22: mol_type = other RNA
atctggcccaggcaccgccagc

SEQ ID NO: 3199 - RNA, 22 nt, synthetic construct
  source 1..22: mol_type = other RNA
atggcgaagaagcgacacagct

SEQ ID NO: 3200 - RNA, 22 nt, synthetic construct
  source 1..22: mol_type = other RNA
atggcggcctcgacctgctgtt

SEQ ID NO: 3201 - RNA, 22 nt, synthetic construct
  source 1..22: mol_type = other RNA
atggcgtcgcacagaccctggg

SEQ ID NO: 3202 - RNA, 22 nt, synthetic construct
  source 1..22: mol_type = other RNA
atgggcccgtgccaccgccccc

SEQ ID NO: 3203 - RNA, 22 nt, synthetic construct
  source 1..22: mol_type = other RNA
atgggggcggtggcacgggccc

SEQ ID NO: 3204 - RNA, 22 nt, synthetic construct
  source 1..22: mol_type = other RNA
atggtcctgacgctgcttctct

SEQ ID NO: 3205 - RNA, 22 nt, synthetic construct
  source 1..22: mol_type = other RNA
atgtcccccgcggccccgcgcc

SEQ ID NO: 3206 - RNA, 22 nt, synthetic construct
  source 1..22: mol_type = other RNA
atgtcgggcccacggccgggcg

SEQ ID NO: 3207 - RNA, 22 nt, synthetic construct
  source 1..22: mol_type = other RNA
caacagcaggtcgaggccgcca

SEQ ID NO: 3208 - RNA, 22 nt, synthetic construct
  source 1..22: mol_type = other RNA
caaccccggcctggcgcgctca

SEQ ID NO: 3209 - RNA, 22 nt, synthetic construct
  source 1..22: mol_type = other RNA
caactccggcgcctgcagcagc

SEQ ID NO: 3210 - RNA, 22 nt, synthetic construct
  source 1..22: mol_type = other RNA
caagctgtgtcgcttcttcgcc

SEQ ID NO: 3211 - RNA, 22 nt, synthetic construct
  source 1..22: mol_type = other RNA
caaggcctgctgcagctccggc

SEQ ID NO: 3212 - RNA, 22 nt, synthetic construct
  source 1..22: mol_type = other RNA
cacacgcgtctccaactccggc

SEQ ID NO: 3213 - RNA, 22 nt, synthetic construct
  source 1..22: mol_type = other RNA
cacagaccctgggctacctcgc

SEQ ID NO: 3214 - RNA, 22 nt, synthetic construct
  source 1..22: mol_type = other RNA
cacagcttgtaggcggagagaa

SEQ ID NO: 3215 - RNA, 22 nt, synthetic construct
  source 1..22: mol_type = other RNA
caccaggatctgctccagcagg

SEQ ID NO: 3216 - RNA, 22 nt, synthetic construct
  source 1..22: mol_type = other RNA
caccagttggaagacctcggcc

SEQ ID NO: 3217 - RNA, 22 nt, synthetic construct
  source 1..22: mol_type = other RNA
caccatgggcccgtgccaccgc

SEQ ID NO: 3218 - RNA, 22 nt, synthetic construct
  source 1..22: mol_type = other RNA
caccgaggtgcaggacgccctg

SEQ ID NO: 3219 - RNA, 22 nt, synthetic construct
  source 1..22: mol_type = other RNA
caccgccagccgctcggcgccc

SEQ ID NO: 3220 - RNA, 22 nt, synthetic construct
  source 1..22: mol_type = other RNA
caccgcccccatctggcccagg

SEQ ID NO: 3221 - RNA, 22 nt, synthetic construct
  source 1..22: mol_type = other RNA
caccggttctcagccaccagga

SEQ ID NO: 3222 - RNA, 22 nt, synthetic construct
  source 1..22: mol_type = other RNA
cacctcggtgcctgcccccggc

SEQ ID NO: 3223 - RNA, 22 nt, synthetic construct
  source 1..22: mol_type = other RNA
cacgcgtctccaactccggcgc

SEQ ID NO: 3224 - RNA, 22 nt, synthetic construct
  source 1..22: mol_type = other RNA
cacggcccgcgcgccgcccgcc

SEQ ID NO: 3225 - RNA, 22 nt, synthetic construct
  source 1..22: mol_type = other RNA
cacggccgggcgccgagcggct

SEQ ID NO: 3226 - RNA, 22 nt, synthetic construct
  source 1..22: mol_type = other RNA
cagaccctgggctacctcgcgg

SEQ ID NO: 3227 - RNA, 22 nt, synthetic construct
  source 1..22: mol_type = other RNA
cagatcctggtggctgagaacc

SEQ ID NO: 3228 - RNA, 22 nt, synthetic construct
  source 1..22: mol_type = other RNA
cagatgggggcggtggcacggg

SEQ ID NO: 3229 - RNA, 22 nt, synthetic construct
  source 1..22: mol_type = other RNA
cagcagccaggcctcctccacc

SEQ ID NO: 3230 - RNA, 22 nt, synthetic construct
  source 1..22: mol_type = other RNA
cagcagccgcaacagcaggtcg

SEQ ID NO: 3231 - RNA, 22 nt, synthetic construct
  source 1..22: mol_type = other RNA
cagcaggccttgtccgcgctga

SEQ ID NO: 3232 - RNA, 22 nt, synthetic construct
  source 1..22: mol_type = other RNA
cagcaggcgcgcggcctgcaca

SEQ ID NO: 3233 - RNA, 22 nt, synthetic construct
  source 1..22: mol_type = other RNA
cagcaggtcgaggccgccatcg

SEQ ID NO: 3234 - RNA, 22 nt, synthetic construct
  source 1..22: mol_type = other RNA
cagccaccaggatctgctccag

SEQ ID NO: 3235 - RNA, 22 nt, synthetic construct
  source 1..22: mol_type = other RNA
cagccaggcctcctccaccagt

SEQ ID NO: 3236 - RNA, 22 nt, synthetic construct
  source 1..22: mol_type = other RNA
cagccgcaacagcaggtcgagg

SEQ ID NO: 3237 - RNA, 22 nt, synthetic construct
  source 1..22: mol_type = other RNA
cagccgctcggcgcccggccgt

SEQ ID NO: 3238 - RNA, 22 nt, synthetic construct
  source 1..22: mol_type = other RNA
cagcgcgcgctccagggcgtcc

SEQ ID NO: 3239 - RNA, 22 nt, synthetic construct
  source 1..22: mol_type = other RNA
cagcgcggacaaggcctgctgc

SEQ ID NO: 3240 - RNA, 22 nt, synthetic construct
  source 1..22: mol_type = other RNA
cagcgtcaggaccatgggcgcg

SEQ ID NO: 3241 - RNA, 22 nt, synthetic construct
  source 1..22: mol_type = other RNA
cagctccggcagcgcgcgctcc

SEQ ID NO: 3242 - RNA, 22 nt, synthetic construct
  source 1..22: mol_type = other RNA
cagcttgtaggcggagagaagc

SEQ ID NO: 3243 - RNA, 22 nt, synthetic construct
  source 1..22: mol_type = other RNA
caggaccatgggcgcggggccg

SEQ ID NO: 3244 - RNA, 22 nt, synthetic construct
  source 1..22: mol_type = other RNA
caggacgccctggagcgcgcgc

SEQ ID NO: 3245 - RNA, 22 nt, synthetic construct
  source 1..22: mol_type = other RNA
caggatctgctccagcaggcgc

SEQ ID NO: 3246 - RNA, 22 nt, synthetic construct
  source 1..22: mol_type = other RNA
caggcaccgaggtgcaggacgc

SEQ ID NO: 3247 - RNA, 22 nt, synthetic construct
  source 1..22: mol_type = other RNA
caggcaccgccagccgctcggc

SEQ ID NO: 3248 - RNA, 22 nt, synthetic construct
  source 1..22: mol_type = other RNA
caggccgcgcgcctgctggagc

SEQ ID NO: 3249 - RNA, 22 nt, synthetic construct
  source 1..22: mol_type = other RNA
caggccggcgcccacggcccgc

SEQ ID NO: 3250 - RNA, 22 nt, synthetic construct
  source 1..22: mol_type = other RNA
caggcctcctccaccagttgga

SEQ ID NO: 3251 - RNA, 22 nt, synthetic construct
  source 1..22: mol_type = other RNA
caggccttgtccgcgctgaagc

SEQ ID NO: 3252 - RNA, 22 nt, synthetic construct
  source 1..22: mol_type = other RNA
caggcgccggagttggagacgc

SEQ ID NO: 3253 - RNA, 22 nt, synthetic construct
  source 1..22: mol_type = other RNA
caggcgcgcggcctgcacacgc

SEQ ID NO: 3254 - RNA, 22 nt, synthetic construct
  source 1..22: mol_type = other RNA
caggcgggcggcgcgcgggccg

SEQ ID NO: 3255 - RNA, 22 nt, synthetic construct
  source 1..22: mol_type = other RNA
cagggcgtcctgcacctcggtg

SEQ ID NO: 3256 - RNA, 22 nt, synthetic construct
  source 1..22: mol_type = other RNA
cagggtctgtgcgacgccatcc

SEQ ID NO: 3257 - RNA, 22 nt, synthetic construct
  source 1..22: mol_type = other RNA
caggtcgaggccgccatcgagg

SEQ ID NO: 3258 - RNA, 22 nt, synthetic construct
  source 1..22: mol_type = other RNA
cagttggaagacctcggccagg

SEQ ID NO: 3259 - RNA, 22 nt, synthetic construct
  source 1..22: mol_type = other RNA
catccgcctcgatggcggcctc

SEQ ID NO: 3260 - RNA, 22 nt, synthetic construct
  source 1..22: mol_type = other RNA
catcgaggcggatggcgtcgca

SEQ ID NO: 3261 - RNA, 22 nt, synthetic construct
  source 1..22: mol_type = other RNA
catctggcccaggcaccgccag

SEQ ID NO: 3262 - RNA, 22 nt, synthetic construct
  source 1..22: mol_type = other RNA
catggcgaagaagcgacacagc

SEQ ID NO: 3263 - RNA, 22 nt, synthetic construct
  source 1..22: mol_type = other RNA
catgggcccgtgccaccgcccc

SEQ ID NO: 3264 - RNA, 22 nt, synthetic construct
  source 1..22: mol_type = other RNA
catggtcctgacgctgcttctc

SEQ ID NO: 3265 - RNA, 22 nt, synthetic construct
  source 1..22: mol_type = other RNA
catgtcgggcccacggccgggc

SEQ ID NO: 3266 - RNA, 22 nt, synthetic construct
  source 1..22: mol_type = other RNA
ccaaccccggcctggcgcgctc

SEQ ID NO: 3267 - RNA, 22 nt, synthetic construct
  source 1..22: mol_type = other RNA
ccaactccggcgcctgcagcag

SEQ ID NO: 3268 - RNA, 22 nt, synthetic construct
  source 1..22: mol_type = other RNA
ccaccaggatctgctccagcag

SEQ ID NO: 3269 - RNA, 22 nt, synthetic construct
  source 1..22: mol_type = other RNA
ccaccagttggaagacctcggc

SEQ ID NO: 3270 - RNA, 22 nt, synthetic construct
  source 1..22: mol_type = other RNA
ccaccatgggcccgtgccaccg

SEQ ID NO: 3271 - RNA, 22 nt, synthetic construct
  source 1..22: mol_type = other RNA
ccaccgcccccatctggcccag

SEQ ID NO: 3272 - RNA, 22 nt, synthetic construct
  source 1..22: mol_type = other RNA
ccacggcccgcgcgccgcccgc

SEQ ID NO: 3273 - RNA, 22 nt, synthetic construct
  source 1..22: mol_type = other RNA
ccacggccgggcgccgagcggc

SEQ ID NO: 3274 - RNA, 22 nt, synthetic construct
  source 1..22: mol_type = other RNA
ccagatgggggcggtggcacgg

SEQ ID NO: 3275 - RNA, 22 nt, synthetic construct
  source 1..22: mol_type = other RNA
ccagcaggcgcgcggcctgcac

SEQ ID NO: 3276 - RNA, 22 nt, synthetic construct
  source 1..22: mol_type = other RNA
ccagccgctcggcgcccggccg

SEQ ID NO: 3277 - RNA, 22 nt, synthetic construct
  source 1..22: mol_type = other RNA
ccaggatctgctccagcaggcg

SEQ ID NO: 3278 - RNA, 22 nt, synthetic construct
  source 1..22: mol_type = other RNA
ccaggcaccgccagccgctcgg

SEQ ID NO: 3279 - RNA, 22 nt, synthetic construct
  source 1..22: mol_type = other RNA
ccaggccggcgcccacggcccg

SEQ ID NO: 3280 - RNA, 22 nt, synthetic construct
  source 1..22: mol_type = other RNA
ccaggcctcctccaccagttgg

SEQ ID NO: 3281 - RNA, 22 nt, synthetic construct
  source 1..22: mol_type = other RNA
ccagggcgtcctgcacctcggt

SEQ ID NO: 3282 - RNA, 22 nt, synthetic construct
  source 1..22: mol_type = other RNA
ccagggtctgtgcgacgccatc

SEQ ID NO: 3283 - RNA, 22 nt, synthetic construct
  source 1..22: mol_type = other RNA
ccagttggaagacctcggccag

SEQ ID NO: 3284 - RNA, 22 nt, synthetic construct
  source 1..22: mol_type = other RNA
ccatccgcctcgatggcggcct

SEQ ID NO: 3285 - RNA, 22 nt, synthetic construct
  source 1..22: mol_type = other RNA
ccatcgaggcggatggcgtcgc

SEQ ID NO: 3286 - RNA, 22 nt, synthetic construct
  source 1..22: mol_type = other RNA
ccatctggcccaggcaccgcca

SEQ ID NO: 3287 - RNA, 22 nt, synthetic construct
  source 1..22: mol_type = other RNA
ccatgggcccgtgccaccgccc

SEQ ID NO: 3288 - RNA, 22 nt, synthetic construct
  source 1..22: mol_type = other RNA
ccatggtcctgacgctgcttct

SEQ ID NO: 3289 - RNA, 22 nt, synthetic construct
  source 1..22: mol_type = other RNA
ccatgtcgggcccacggccggg

SEQ ID NO: 3290 - RNA, 22 nt, synthetic construct
  source 1..22: mol_type = other RNA
cccaaccccggcctggcgcgct

SEQ ID NO: 3291 - RNA, 22 nt, synthetic construct
  source 1..22: mol_type = other RNA
cccaccatgggcccgtgccacc

SEQ ID NO: 3292 - RNA, 22 nt, synthetic construct
  source 1..22: mol_type = other RNA
cccacggcccgcgcgccgcccg

SEQ ID NO: 3293 - RNA, 22 nt, synthetic construct
  source 1..22: mol_type = other RNA
cccacggccgggcgccgagcgg

SEQ ID NO: 3294 - RNA, 22 nt, synthetic construct
  source 1..22: mol_type = other RNA
cccaggcaccgccagccgctcg

SEQ ID NO: 3295 - RNA, 22 nt, synthetic construct
  source 1..22: mol_type = other RNA
cccagggtctgtgcgacgccat

SEQ ID NO: 3296 - RNA, 22 nt, synthetic construct
  source 1..22: mol_type = other RNA
cccatctggcccaggcaccgcc

SEQ ID NO: 3297 - RNA, 22 nt, synthetic construct
  source 1..22: mol_type = other RNA
cccatggtcctgacgctgcttc

SEQ ID NO: 3298 - RNA, 22 nt, synthetic construct
  source 1..22: mol_type = other RNA
ccccatctggcccaggcaccgc

SEQ ID NO: 3299 - RNA, 22 nt, synthetic construct
  source 1..22: mol_type = other RNA
cccccatctggcccaggcaccg

SEQ ID NO: 3300 - RNA, 22 nt, synthetic construct
  source 1..22: mol_type = other RNA
cccccgcggccccgcgcccatg

SEQ ID NO: 3301 - RNA, 22 nt, synthetic construct
  source 1..22: mol_type = other RNA
cccccggcgacacttcgcgggg

SEQ ID NO: 3302 - RNA, 22 nt, synthetic construct
  source 1..22: mol_type = other RNA
ccccgcgaagtgtcgccggggg

SEQ ID NO: 3303 - RNA, 22 nt, synthetic construct
  source 1..22: mol_type = other RNA
ccccgcgcccatggtcctgacg

SEQ ID NO: 3304 - RNA, 22 nt, synthetic construct
  source 1..22: mol_type = other RNA
ccccgcggccccgcgcccatgg

SEQ ID NO: 3305 - RNA, 22 nt, synthetic construct
  source 1..22: mol_type = other RNA
ccccggcctggcgcgctcaccg

SEQ ID NO: 3306 - RNA, 22 nt, synthetic construct
  source 1..22: mol_type = other RNA
ccccggcgacacttcgcggggc

SEQ ID NO: 3307 - RNA, 22 nt, synthetic construct
  source 1..22: mol_type = other RNA
cccgacatggcgaagaagcgac

SEQ ID NO: 3308 - RNA, 22 nt, synthetic construct
  source 1..22: mol_type = other RNA
cccgcctgcttcagcgcggaca

SEQ ID NO: 3309 - RNA, 22 nt, synthetic construct
  source 1..22: mol_type = other RNA
cccgcgaagtgtcgccgggggc

SEQ ID NO: 3310 - RNA, 22 nt, synthetic construct
  source 1..22: mol_type = other RNA
cccgcgcccatggtcctgacgc

SEQ ID NO: 3311 - RNA, 22 nt, synthetic construct
  source 1..22: mol_type = other RNA
cccgcgcgccgcccgcctgctt

SEQ ID NO: 3312 - RNA, 22 nt, synthetic construct
  source 1..22: mol_type = other RNA
cccgcggccccgcgcccatggt

SEQ ID NO: 3313 - RNA, 22 nt, synthetic construct
  source 1..22: mol_type = other RNA
cccggccgtgggcccgacatgg

SEQ ID NO: 3314 - RNA, 22 nt, synthetic construct
  source 1..22: mol_type = other RNA
cccggcctggcgcgctcaccgg

SEQ ID NO: 3315 - RNA, 22 nt, synthetic construct
  source 1..22: mol_type = other RNA
cccggcgacacttcgcggggcc

SEQ ID NO: 3316 - RNA, 22 nt, synthetic construct
  source 1..22: mol_type = other RNA
cccgtgccaccgcccccatctg

SEQ ID NO: 3317 - RNA, 22 nt, synthetic construct
  source 1..22: mol_type = other RNA
ccctggagcgcgcgctgccgga

SEQ ID NO: 3318 - RNA, 22 nt, synthetic construct
  source 1..22: mol_type = other RNA
ccgacatggcgaagaagcgaca

SEQ ID NO: 3319 - RNA, 22 nt, synthetic construct
  source 1..22: mol_type = other RNA
ccgagcggctggcggtgcctgg

SEQ ID NO: 3320 - RNA, 22 nt, synthetic construct
  source 1..22: mol_type = other RNA
ccgaggtcttccaactggtgga

SEQ ID NO: 3321 - RNA, 22 nt, synthetic construct
  source 1..22: mol_type = other RNA
ccgaggtgcaggacgccctgga

SEQ ID NO: 3322 - RNA, 22 nt, synthetic construct
  source 1..22: mol_type = other RNA
ccgcaacagcaggtcgaggccg

SEQ ID NO: 3323 - RNA, 22 nt, synthetic construct
  source 1..22: mol_type = other RNA
ccgccagccgctcggcgcccgg

SEQ ID NO: 3324 - RNA, 22 nt, synthetic construct
  source 1..22: mol_type = other RNA
ccgccatcgaggcggatggcgt

SEQ ID NO: 3325 - RNA, 22 nt, synthetic construct
  source 1..22: mol_type = other RNA
ccgcccccatctggcccaggca

SEQ ID NO: 3326 - RNA, 22 nt, synthetic construct
  source 1..22: mol_type = other RNA
ccgcccgcctgcttcagcgcgg

SEQ ID NO: 3327 - RNA, 22 nt, synthetic construct
  source 1..22: mol_type = other RNA
ccgcctacaagctgtgtcgctt

SEQ ID NO: 3328 - RNA, 22 nt, synthetic construct
  source 1..22: mol_type = other RNA
ccgcctcgatggcggcctcgac

SEQ ID NO: 3329 - RNA, 22 nt, synthetic construct
  source 1..22: mol_type = other RNA
ccgcctgcttcagcgcggacaa

SEQ ID NO: 3330 - RNA, 22 nt, synthetic construct
  source 1..22: mol_type = other RNA
ccgcgaagtgtcgccgggggca

SEQ ID NO: 3331 - RNA, 22 nt, synthetic construct
  source 1..22: mol_type = other RNA
ccgcgaggtagcccagggtctg

SEQ ID NO: 3332 - RNA, 22 nt, synthetic construct
  source 1..22: mol_type = other RNA
ccgcgcccatggtcctgacgct

SEQ ID NO: 3333 - RNA, 22 nt, synthetic construct
  source 1..22: mol_type = other RNA
ccgcgcgccgcccgcctgcttc

SEQ ID NO: 3334 - RNA, 22 nt, synthetic construct
  source 1..22: mol_type = other RNA
ccgcgcgcctgctggagcagat

SEQ ID NO: 3335 - RNA, 22 nt, synthetic construct
  source 1..22: mol_type = other RNA
ccgcgctgaagcaggcgggcgg

SEQ ID NO: 3336 - RNA, 22 nt, synthetic construct
  source 1..22: mol_type = other RNA
ccgcggccccgcgcccatggtc

SEQ ID NO: 3337 - RNA, 22 nt, synthetic construct
  source 1..22: mol_type = other RNA
ccgcgggccccgcgaagtgtcg

SEQ ID NO: 3338 - RNA, 22 nt, synthetic construct
  source 1..22: mol_type = other RNA
ccgctcggcgcccggccgtggg

SEQ ID NO: 3339 - RNA, 22 nt, synthetic construct
  source 1..22: mol_type = other RNA
ccggagctgcagcaggccttgt

SEQ ID NO: 3340 - RNA, 22 nt, synthetic construct
  source 1..22: mol_type = other RNA
ccggagttggagacgcgtgtgc

SEQ ID NO: 3341 - RNA, 22 nt, synthetic construct
  source 1..22: mol_type = other RNA
ccggcagcgcgcgctccagggc

SEQ ID NO: 3342 - RNA, 22 nt, synthetic construct
  source 1..22: mol_type = other RNA
ccggccgtgggcccgacatggc

SEQ ID NO: 3343 - RNA, 22 nt, synthetic construct
  source 1..22: mol_type = other RNA
ccggcctggccgaggtcttcca

SEQ ID NO: 3344 - RNA, 22 nt, synthetic construct
  source 1..22: mol_type = other RNA
ccggcctggcgcgctcaccggt

SEQ ID NO: 3345 - RNA, 22 nt, synthetic construct
  source 1..22: mol_type = other RNA
ccggcgacacttcgcggggccc

SEQ ID NO: 3346 - RNA, 22 nt, synthetic construct
  source 1..22: mol_type = other RNA
ccggcgcccacggcccgcgcgc

SEQ ID NO: 3347 - RNA, 22 nt, synthetic construct
  source 1..22: mol_type = other RNA
ccggcgcctgcagcagccgcaa

SEQ ID NO: 3348 - RNA, 22 nt, synthetic construct
  source 1..22: mol_type = other RNA
ccgggcgccgagcggctggcgg

SEQ ID NO: 3349 - RNA, 22 nt, synthetic construct
  source 1..22: mol_type = other RNA
ccgggggcaggcaccgaggtgc

SEQ ID NO: 3350 - RNA, 22 nt, synthetic construct
  source 1..22: mol_type = other RNA
ccggtgagcgcgccaggccggg

SEQ ID NO: 3351 - RNA, 22 nt, synthetic construct
  source 1..22: mol_type = other RNA
ccggttctcagccaccaggatc

SEQ ID NO: 3352 - RNA, 22 nt, synthetic construct
  source 1..22: mol_type = other RNA
ccgtgccaccgcccccatctgg

SEQ ID NO: 3353 - RNA, 22 nt, synthetic construct
  source 1..22: mol_type = other RNA
ccgtgggcccgacatggcgaag

SEQ ID NO: 3354 - RNA, 22 nt, synthetic construct
  source 1..22: mol_type = other RNA
ccgtgggccgcgaggtagccca

SEQ ID NO: 3355 - RNA, 22 nt, synthetic construct
  source 1..22: mol_type = other RNA
ccgtgggcgccggcctggccga

SEQ ID NO: 3356 - RNA, 22 nt, synthetic construct
  source 1..22: mol_type = other RNA
cctacaagctgtgtcgcttctt

SEQ ID NO: 3357 - RNA, 22 nt, synthetic construct
  source 1..22: mol_type = other RNA
cctccaccagttggaagacctc

SEQ ID NO: 3358 - RNA, 22 nt, synthetic construct
  source 1..22: mol_type = other RNA
cctcctccaccagttggaagac

SEQ ID NO: 3359 - RNA, 22 nt, synthetic construct
  source 1..22: mol_type = other RNA
cctcgacctgctgttgcggctg

SEQ ID NO: 3360 - RNA, 22 nt, synthetic construct
  source 1..22: mol_type = other RNA
cctcgatggcggcctcgacctg

SEQ ID NO: 3361 - RNA, 22 nt, synthetic construct
  source 1..22: mol_type = other RNA
cctcggccaggccggcgcccac

SEQ ID NO: 3362 - RNA, 22 nt, synthetic construct
  source 1..22: mol_type = other RNA
cctcggtgcctgcccccggcga

SEQ ID NO: 3363 - RNA, 22 nt, synthetic construct
  source 1..22: mol_type = other RNA
cctgacgctgcttctctccgcc

SEQ ID NO: 3364 - RNA, 22 nt, synthetic construct
  source 1..22: mol_type = other RNA
cctgcacacgcgtctccaactc

SEQ ID NO: 3365 - RNA, 22 nt, synthetic construct
  source 1..22: mol_type = other RNA
cctgcacctcggtgcctgcccc

SEQ ID NO: 3366 - RNA, 22 nt, synthetic construct
  source 1..22: mol_type = other RNA
cctgcagcagccgcaacagcag

SEQ ID NO: 3367 - RNA, 22 nt, synthetic construct
  source 1..22: mol_type = other RNA
cctgcccccggcgacacttcgc

SEQ ID NO: 3368 - RNA, 22 nt, synthetic construct
  source 1..22: mol_type = other RNA
cctgctgcagctccggcagcgc

SEQ ID NO: 3369 - RNA, 22 nt, synthetic construct
  source 1..22: mol_type = other RNA
cctgctggagcagatcctggtg

SEQ ID NO: 3370 - RNA, 22 nt, synthetic construct
  source 1..22: mol_type = other RNA
cctgctgttgcggctgctgcag

SEQ ID NO: 3371 - RNA, 22 nt, synthetic construct
  source 1..22: mol_type = other RNA
cctgcttcagcgcggacaaggc

SEQ ID NO: 3372 - RNA, 22 nt, synthetic construct
  source 1..22: mol_type = other RNA
cctggagcgcgcgctgccggag

SEQ ID NO: 3373 - RNA, 22 nt, synthetic construct
  source 1..22: mol_type = other RNA
cctggccgaggtcttccaactg

SEQ ID NO: 3374 - RNA, 22 nt, synthetic construct
  source 1..22: mol_type = other RNA
cctggcgcgctcaccggttctc

SEQ ID NO: 3375 - RNA, 22 nt, synthetic construct
  source 1..22: mol_type = other RNA
cctgggccagatgggggcggtg

SEQ ID NO: 3376 - RNA, 22 nt, synthetic construct
  source 1..22: mol_type = other RNA
cctggtggctgagaaccggtga

SEQ ID NO: 3377 - RNA, 22 nt, synthetic construct
  source 1..22: mol_type = other RNA
ccttgtccgcgctgaagcaggc

SEQ ID NO: 3378 - RNA, 22 nt, synthetic construct
  source 1..22: mol_type = other RNA
cgaagaagcgacacagcttgta

SEQ ID NO: 3379 - RNA, 22 nt, synthetic construct
  source 1..22: mol_type = other RNA
cgaagtgtcgccgggggcaggc

SEQ ID NO: 3380 - RNA, 22 nt, synthetic construct
  source 1..22: mol_type = other RNA
cgacacagcttgtaggcggaga

SEQ ID NO: 3381 - RNA, 22 nt, synthetic construct
  source 1..22: mol_type = other RNA
cgacatggcgaagaagcgacac

SEQ ID NO: 3382 - RNA, 22 nt, synthetic construct
  source 1..22: mol_type = other RNA
cgacctgctgttgcggctgctg

SEQ ID NO: 3383 - RNA, 22 nt, synthetic construct
  source 1..22: mol_type = other RNA
cgacgccatccgcctcgatggc

SEQ ID NO: 3384 - RNA, 22 nt, synthetic construct
  source 1..22: mol_type = other RNA
cgagcggctggcggtgcctggg

SEQ ID NO: 3385 - RNA, 22 nt, synthetic construct
  source 1..22: mol_type = other RNA
cgaggccgccatcgaggcggat

SEQ ID NO: 3386 - RNA, 22 nt, synthetic construct
  source 1..22: mol_type = other RNA
cgaggcggatggcgtcgcacag

SEQ ID NO: 3387 - RNA, 22 nt, synthetic construct
  source 1..22: mol_type = other RNA
cgaggtagcccagggtctgtgc

SEQ ID NO: 3388 - RNA, 22 nt, synthetic construct
  source 1..22: mol_type = other RNA
cgaggtcttccaactggtggag

SEQ ID NO: 3389 - RNA, 22 nt, synthetic construct
  source 1..22: mol_type = other RNA
cgaggtgcaggacgccctggag

SEQ ID NO: 3390 - RNA, 22 nt, synthetic construct
  source 1..22: mol_type = other RNA
cgatggcggcctcgacctgctg

SEQ ID NO: 3391 - RNA, 22 nt, synthetic construct
  source 1..22: mol_type = other RNA
cgcaacagcaggtcgaggccgc

SEQ ID NO: 3392 - RNA, 22 nt, synthetic construct
  source 1..22: mol_type = other RNA
cgcacagaccctgggctacctc

SEQ ID NO: 3393 - RNA, 22 nt, synthetic construct
  source 1..22: mol_type = other RNA
cgccagccgctcggcgcccggc

SEQ ID NO: 3394 - RNA, 22 nt, synthetic construct
  source 1..22: mol_type = other RNA
cgccatccgcctcgatggcggc

SEQ ID NO: 3395 - RNA, 22 nt, synthetic construct
  source 1..22: mol_type = other RNA
cgccatcgaggcggatggcgtc

SEQ ID NO: 3396 - RNA, 22 nt, synthetic construct
  source 1..22: mol_type = other RNA
cgccatgtcgggcccacggccg

SEQ ID NO: 3397 - RNA, 22 nt, synthetic construct
  source 1..22: mol_type = other RNA
cgcccacggcccgcgcgccgcc

SEQ ID NO: 3398 - RNA, 22 nt, synthetic construct
  source 1..22: mol_type = other RNA
cgcccatggtcctgacgctgct

SEQ ID NO: 3399 - RNA, 22 nt, synthetic construct
  source 1..22: mol_type = other RNA
cgcccccatctggcccaggcac

SEQ ID NO: 3400 - RNA, 22 nt, synthetic construct
  source 1..22: mol_type = other RNA
cgcccgcctgcttcagcgcgga

SEQ ID NO: 3401 - RNA, 22 nt, synthetic construct
  source 1..22: mol_type = other RNA
cgcccggccgtgggcccgacat

SEQ ID NO: 3402 - RNA, 22 nt, synthetic construct
  source 1..22: mol_type = other RNA
cgccctggagcgcgcgctgccg

SEQ ID NO: 3403 - RNA, 22 nt, synthetic construct
  source 1..22: mol_type = other RNA
cgccgagcggctggcggtgcct

SEQ ID NO: 3404 - RNA, 22 nt, synthetic construct
  source 1..22: mol_type = other RNA
cgccgcccgcctgcttcagcgc

SEQ ID NO: 3405 - RNA, 22 nt, synthetic construct
  source 1..22: mol_type = other RNA
cgccggagttggagacgcgtgt

SEQ ID NO: 3406 - RNA, 22 nt, synthetic construct
  source 1..22: mol_type = other RNA
cgccggcctggccgaggtcttc

SEQ ID NO: 3407 - RNA, 22 nt, synthetic construct
  source 1..22: mol_type = other RNA
cgccgggggcaggcaccgaggt

SEQ ID NO: 3408 - RNA, 22 nt, synthetic construct
  source 1..22: mol_type = other RNA
cgcctacaagctgtgtcgcttc

SEQ ID NO: 3409 - RNA, 22 nt, synthetic construct
  source 1..22: mol_type = other RNA
cgcctcgatggcggcctcgacc

SEQ ID NO: 3410 - RNA, 22 nt, synthetic construct
  source 1..22: mol_type = other RNA
cgcctgcagcagccgcaacagc

SEQ ID NO: 3411 - RNA, 22 nt, synthetic construct
  source 1..22: mol_type = other RNA
cgcctgctggagcagatcctgg

SEQ ID NO: 3412 - RNA, 22 nt, synthetic construct
  source 1..22: mol_type = other RNA
cgcctgcttcagcgcggacaag

SEQ ID NO: 3413 - RNA, 22 nt, synthetic construct
  source 1..22: mol_type = other RNA
cgcgaagtgtcgccgggggcag

SEQ ID NO: 3414 - RNA, 22 nt, synthetic construct
  source 1..22: mol_type = other RNA
cgcgaggtagcccagggtctgt

SEQ ID NO: 3415 - RNA, 22 nt, synthetic construct
  source 1..22: mol_type = other RNA
cgcgcccatggtcctgacgctg

SEQ ID NO: 3416 - RNA, 22 nt, synthetic construct
  source 1..22: mol_type = other RNA
cgcgccgcccgcctgcttcagc

SEQ ID NO: 3417 - RNA, 22 nt, synthetic construct
  source 1..22: mol_type = other RNA
cgcgcctgctggagcagatcct

SEQ ID NO: 3418 - RNA, 22 nt, synthetic construct
  source 1..22: mol_type = other RNA
cgcgcgccgcccgcctgcttca

SEQ ID NO: 3419 - RNA, 22 nt, synthetic construct
  source 1..22: mol_type = other RNA
cgcgcgcctgctggagcagatc

SEQ ID NO: 3420 - RNA, 22 nt, synthetic construct
  source 1..22: mol_type = other RNA
cgcgcgctccagggcgtcctgc

SEQ ID NO: 3421 - RNA, 22 nt, synthetic construct
  source 1..22: mol_type = other RNA
cgcgcgctgccggagctgcagc

SEQ ID NO: 3422 - RNA, 22 nt, synthetic construct
  source 1..22: mol_type = other RNA
cgcgcggcctgcacacgcgtct

SEQ ID NO: 3423 - RNA, 22 nt, synthetic construct
  source 1..22: mol_type = other RNA
cgcgcgggccgtgggcgccggc

SEQ ID NO: 3424 - RNA, 22 nt, synthetic construct
  source 1..22: mol_type = other RNA
cgcgctcaccggttctcagcca

SEQ ID NO: 3425 - RNA, 22 nt, synthetic construct
  source 1..22: mol_type = other RNA
cgcgctccagggcgtcctgcac

SEQ ID NO: 3426 - RNA, 22 nt, synthetic construct
  source 1..22: mol_type = other RNA
cgcgctgaagcaggcgggcggc

SEQ ID NO: 3427 - RNA, 22 nt, synthetic construct
  source 1..22: mol_type = other RNA
cgcgctgccggagctgcagcag

SEQ ID NO: 3428 - RNA, 22 nt, synthetic construct
  source 1..22: mol_type = other RNA
cgcggacaaggcctgctgcagc

SEQ ID NO: 3429 - RNA, 22 nt, synthetic construct
  source 1..22: mol_type = other RNA
cgcggccccgcgcccatggtcc

SEQ ID NO: 3430 - RNA, 22 nt, synthetic construct
  source 1..22: mol_type = other RNA
cgcggcctgcacacgcgtctcc

SEQ ID NO: 3431 - RNA, 22 nt, synthetic construct
  source 1..22: mol_type = other RNA
cgcgggccccgcgaagtgtcgc

SEQ ID NO: 3432 - RNA, 22 nt, synthetic construct
  source 1..22: mol_type = other RNA
cgcgggccgtgggcgccggcct

SEQ ID NO: 3433 - RNA, 22 nt, synthetic construct
  source 1..22: mol_type = other RNA
cgcgtctccaactccggcgcct

SEQ ID NO: 3434 - RNA, 22 nt, synthetic construct
  source 1..22: mol_type = other RNA
cgcgtgtgcaggccgcgcgcct

SEQ ID NO: 3435 - RNA, 22 nt, synthetic construct
  source 1..22: mol_type = other RNA
cgctcaccggttctcagccacc

SEQ ID NO: 3436 - RNA, 22 nt, synthetic construct
  source 1..22: mol_type = other RNA
cgctccagggcgtcctgcacct

SEQ ID NO: 3437 - RNA, 22 nt, synthetic construct
  source 1..22: mol_type = other RNA
cgctcggcgcccggccgtgggc

SEQ ID NO: 3438 - RNA, 22 nt, synthetic construct
  source 1..22: mol_type = other RNA
cgctgaagcaggcgggcggcgc

SEQ ID NO: 3439 - RNA, 22 nt, synthetic construct
  source 1..22: mol_type = other RNA
cgctgccggagctgcagcaggc

SEQ ID NO: 3440 - RNA, 22 nt, synthetic construct
  source 1..22: mol_type = other RNA
cgctgcttctctccgcctacaa

SEQ ID NO: 3441 - RNA, 22 nt, synthetic construct
  source 1..22: mol_type = other RNA
cgcttcttcgccatgtcgggcc

SEQ ID NO: 3442 - RNA, 22 nt, synthetic construct
  source 1..22: mol_type = other RNA
cggacaaggcctgctgcagctc

SEQ ID NO: 3443 - RNA, 22 nt, synthetic construct
  source 1..22: mol_type = other RNA
cggagagaagcagcgtcaggac

SEQ ID NO: 3444 - RNA, 22 nt, synthetic construct
  source 1..22: mol_type = other RNA
cggagctgcagcaggccttgtc

SEQ ID NO: 3445 - RNA, 22 nt, synthetic construct
  source 1..22: mol_type = other RNA
cggagttggagacgcgtgtgca

SEQ ID NO: 3446 - RNA, 22 nt, synthetic construct
  source 1..22: mol_type = other RNA
cggatggcgtcgcacagaccct

SEQ ID NO: 3447 - RNA, 22 nt, synthetic construct
  source 1..22: mol_type = other RNA
cggcagcgcgcgctccagggcg

SEQ ID NO: 3448 - RNA, 22 nt, synthetic construct
  source 1..22: mol_type = other RNA
cggccaggccggcgcccacggc

SEQ ID NO: 3449 - RNA, 22 nt, synthetic construct
  source 1..22: mol_type = other RNA
cggccccgcgcccatggtcctg

SEQ ID NO: 3450 - RNA, 22 nt, synthetic construct
  source 1..22: mol_type = other RNA
cggcccgcgcgccgcccgcctg

SEQ ID NO: 3451 - RNA, 22 nt, synthetic construct
  source 1..22: mol_type = other RNA
cggccgggcgccgagcggctgg

SEQ ID NO: 3452 - RNA, 22 nt, synthetic construct
  source 1..22: mol_type = other RNA
cggccgtgggcccgacatggcg

SEQ ID NO: 3453 - RNA, 22 nt, synthetic construct
  source 1..22: mol_type = other RNA
cggcctcgacctgctgttgcgg

SEQ ID NO: 3454 - RNA, 22 nt, synthetic construct
  source 1..22: mol_type = other RNA
cggcctgcacacgcgtctccaa

SEQ ID NO: 3455 - RNA, 22 nt, synthetic construct
  source 1..22: mol_type = other RNA
cggcctggccgaggtcttccaa

SEQ ID NO: 3456 - RNA, 22 nt, synthetic construct
  source 1..22: mol_type = other RNA
cggcctggcgcgctcaccggtt

SEQ ID NO: 3457 - RNA, 22 nt, synthetic construct
  source 1..22: mol_type = other RNA
cggcgacacttcgcggggcccg

SEQ ID NO: 3458 - RNA, 22 nt, synthetic construct
  source 1..22: mol_type = other RNA
cggcgcccacggcccgcgcgcc

SEQ ID NO: 3459 - RNA, 22 nt, synthetic construct
  source 1..22: mol_type = other RNA
cggcgcccggccgtgggcccga

SEQ ID NO: 3460 - RNA, 22 nt, synthetic construct
  source 1..22: mol_type = other RNA
cggcgcctgcagcagccgcaac

SEQ ID NO: 3461 - RNA, 22 nt, synthetic construct
  source 1..22: mol_type = other RNA
cggcgcgcgggccgtgggcgcc

SEQ ID NO: 3462 - RNA, 22 nt, synthetic construct
  source 1..22: mol_type = other RNA
cggctgctgcaggcgccggagt

SEQ ID NO: 3463 - RNA, 22 nt, synthetic construct
  source 1..22: mol_type = other RNA
cggctggcggtgcctgggccag

SEQ ID NO: 3464 - RNA, 22 nt, synthetic construct
  source 1..22: mol_type = other RNA
cgggcccacggccgggcgccga

SEQ ID NO: 3465 - RNA, 22 nt, synthetic construct
  source 1..22: mol_type = other RNA
cgggccccgcgaagtgtcgccg

SEQ ID NO: 3466 - RNA, 22 nt, synthetic construct
  source 1..22: mol_type = other RNA
cgggccgtgggcgccggcctgg

SEQ ID NO: 3467 - RNA, 22 nt, synthetic construct
  source 1..22: mol_type = other RNA
cgggcgccgagcggctggcggt

SEQ ID NO: 3468 - RNA, 22 nt, synthetic construct
  source 1..22: mol_type = other RNA
cgggcggcgcgcgggccgtggg

SEQ ID NO: 3469 - RNA, 22 nt, synthetic construct
  source 1..22: mol_type = other RNA
cgggggcaggcaccgaggtgca

SEQ ID NO: 3470 - RNA, 22 nt, synthetic construct
  source 1..22: mol_type = other RNA
cgggtggccgcgggccccgcga

SEQ ID NO: 3471 - RNA, 22 nt, synthetic construct
  source 1..22: mol_type = other RNA
cggtgagcgcgccaggccgggg

SEQ ID NO: 3472 - RNA, 22 nt, synthetic construct
  source 1..22: mol_type = other RNA
cggtgcctgcccccggcgacac

SEQ ID NO: 3473 - RNA, 22 nt, synthetic construct
  source 1..22: mol_type = other RNA
cggtgcctgggccagatggggg

SEQ ID NO: 3474 - RNA, 22 nt, synthetic construct
  source 1..22: mol_type = other RNA
cggttctcagccaccaggatct

SEQ ID NO: 3475 - RNA, 22 nt, synthetic construct
  source 1..22: mol_type = other RNA
cgtcaggaccatgggcgcgggg

SEQ ID NO: 3476 - RNA, 22 nt, synthetic construct
  source 1..22: mol_type = other RNA
cgtcctgcacctcggtgcctgc

SEQ ID NO: 3477 - RNA, 22 nt, synthetic construct
  source 1..22: mol_type = other RNA
cgtcgcacagaccctgggctac

SEQ ID NO: 3478 - RNA, 22 nt, synthetic construct
  source 1..22: mol_type = other RNA
cgtctccaactccggcgcctgc

SEQ ID NO: 3479 - RNA, 22 nt, synthetic construct
  source 1..22: mol_type = other RNA
cgtgccaccgcccccatctggc

SEQ ID NO: 3480 - RNA, 22 nt, synthetic construct
  source 1..22: mol_type = other RNA
cgtgggcccgacatggcgaaga

SEQ ID NO: 3481 - RNA, 22 nt, synthetic construct
  source 1..22: mol_type = other RNA
cgtgggccgcgaggtagcccag

SEQ ID NO: 3482 - RNA, 22 nt, synthetic construct
  source 1..22: mol_type = other RNA
cgtgggcgccggcctggccgag

SEQ ID NO: 3483 - RNA, 22 nt, synthetic construct
  source 1..22: mol_type = other RNA
cgtgtgcaggccgcgcgcctgc

SEQ ID NO: 3484 - RNA, 22 nt, synthetic construct
  source 1..22: mol_type = other RNA
ctacaagctgtgtcgcttcttc

SEQ ID NO: 3485 - RNA, 22 nt, synthetic construct
  source 1..22: mol_type = other RNA
ctcaccggttctcagccaccag

SEQ ID NO: 3486 - RNA, 22 nt, synthetic construct
  source 1..22: mol_type = other RNA
ctcagccaccaggatctgctcc

SEQ ID NO: 3487 - RNA, 22 nt, synthetic construct
  source 1..22: mol_type = other RNA
ctccaactccggcgcctgcagc

SEQ ID NO: 3488 - RNA, 22 nt, synthetic construct
  source 1..22: mol_type = other RNA
ctccaccagttggaagacctcg

SEQ ID NO: 3489 - RNA, 22 nt, synthetic construct
  source 1..22: mol_type = other RNA
ctccagcaggcgcgcggcctgc

SEQ ID NO: 3490 - RNA, 22 nt, synthetic construct
  source 1..22: mol_type = other RNA
ctccagggcgtcctgcacctcg

SEQ ID NO: 3491 - RNA, 22 nt, synthetic construct
  source 1..22: mol_type = other RNA
ctcccaaccccggcctggcgcg

SEQ ID NO: 3492 - RNA, 22 nt, synthetic construct
  source 1..22: mol_type = other RNA
ctccgcctacaagctgtgtcgc

SEQ ID NO: 3493 - RNA, 22 nt, synthetic construct
  source 1..22: mol_type = other RNA
ctccggcagcgcgcgctccagg

SEQ ID NO: 3494 - RNA, 22 nt, synthetic construct
  source 1..22: mol_type = other RNA
ctccggcgcctgcagcagccgc

SEQ ID NO: 3495 - RNA, 22 nt, synthetic construct
  source 1..22: mol_type = other RNA
ctcctccaccagttggaagacc

SEQ ID NO: 3496 - RNA, 22 nt, synthetic construct
  source 1..22: mol_type = other RNA
ctcgacctgctgttgcggctgc

SEQ ID NO: 3497 - RNA, 22 nt, synthetic construct
  source 1..22: mol_type = other RNA
ctcgatggcggcctcgacctgc

SEQ ID NO: 3498 - RNA, 22 nt, synthetic construct
  source 1..22: mol_type = other RNA
ctcggccaggccggcgcccacg

SEQ ID NO: 3499 - RNA, 22 nt, synthetic construct
  source 1..22: mol_type = other RNA
ctcggcgcccggccgtgggccc

SEQ ID NO: 3500 - RNA, 22 nt, synthetic construct
  source 1..22: mol_type = other RNA
ctcggtgcctgcccccggcgac

SEQ ID NO: 3501 - RNA, 22 nt, synthetic construct
  source 1..22: mol_type = other RNA
ctctcccaaccccggcctggcg

SEQ ID NO: 3502 - RNA, 22 nt, synthetic construct
  source 1..22: mol_type = other RNA
ctctccgcctacaagctgtgtc

SEQ ID NO: 3503 - RNA, 22 nt, synthetic construct
  source 1..22: mol_type = other RNA
ctgaagcaggcgggcggcgcgc

SEQ ID NO: 3504 - RNA, 22 nt, synthetic construct
  source 1..22: mol_type = other RNA
ctgacgctgcttctctccgcct

SEQ ID NO: 3505 - RNA, 22 nt, synthetic construct
  source 1..22: mol_type = other RNA
ctgagaaccggtgagcgcgcca

SEQ ID NO: 3506 - RNA, 22 nt, synthetic construct
  source 1..22: mol_type = other RNA
ctgcacacgcgtctccaactcc

SEQ ID NO: 3507 - RNA, 22 nt, synthetic construct
  source 1..22: mol_type = other RNA
ctgcacctcggtgcctgccccc

SEQ ID NO: 3508 - RNA, 22 nt, synthetic construct
  source 1..22: mol_type = other RNA
ctgcagcagccgcaacagcagg

SEQ ID NO: 3509 - RNA, 22 nt, synthetic construct
  source 1..22: mol_type = other RNA
ctgcagcaggccttgtccgcgc

SEQ ID NO: 3510 - RNA, 22 nt, synthetic construct
  source 1..22: mol_type = other RNA
ctgcagctccggcagcgcgcgc

SEQ ID NO: 3511 - RNA, 22 nt, synthetic construct
  source 1..22: mol_type = other RNA
ctgcaggcgccggagttggaga

SEQ ID NO: 3512 - RNA, 22 nt, synthetic construct
  source 1..22: mol_type = other RNA
ctgcccccggcgacacttcgcg

SEQ ID NO: 3513 - RNA, 22 nt, synthetic construct
  source 1..22: mol_type = other RNA
ctgccggagctgcagcaggcct

SEQ ID NO: 3514 - RNA, 22 nt, synthetic construct
  source 1..22: mol_type = other RNA
ctgctccagcaggcgcgcggcc

SEQ ID NO: 3515 - RNA, 22 nt, synthetic construct
  source 1..22: mol_type = other RNA
ctgctgcagctccggcagcgcg

SEQ ID NO: 3516 - RNA, 22 nt, synthetic construct
  source 1..22: mol_type = other RNA
ctgctgcaggcgccggagttgg

SEQ ID NO: 3517 - RNA, 22 nt, synthetic construct
  source 1..22: mol_type = other RNA
ctgctggagcagatcctggtgg

SEQ ID NO: 3518 - RNA, 22 nt, synthetic construct
  source 1..22: mol_type = other RNA
ctgctgttgcggctgctgcagg

SEQ ID NO: 3519 - RNA, 22 nt, synthetic construct
  source 1..22: mol_type = other RNA
ctgcttcagcgcggacaaggcc

SEQ ID NO: 3520 - RNA, 22 nt, synthetic construct
  source 1..22: mol_type = other RNA
ctgcttctctccgcctacaagc

SEQ ID NO: 3521 - RNA, 22 nt, synthetic construct
  source 1..22: mol_type = other RNA
ctggagcagatcctggtggctg

SEQ ID NO: 3522 - RNA, 22 nt, synthetic construct
  source 1..22: mol_type = other RNA
ctggagcgcgcgctgccggagc

SEQ ID NO: 3523 - RNA, 22 nt, synthetic construct
  source 1..22: mol_type = other RNA
ctggcccaggcaccgccagccg

SEQ ID NO: 3524 - RNA, 22 nt, synthetic construct
  source 1..22: mol_type = other RNA
ctggccgaggtcttccaactgg

SEQ ID NO: 3525 - RNA, 22 nt, synthetic construct
  source 1..22: mol_type = other RNA
ctggcgcgctcaccggttctca

SEQ ID NO: 3526 - RNA, 22 nt, synthetic construct
  source 1..22: mol_type = other RNA
ctggcggtgcctgggccagatg

SEQ ID NO: 3527 - RNA, 22 nt, synthetic construct
  source 1..22: mol_type = other RNA
ctgggccagatgggggcggtgg

SEQ ID NO: 3528 - RNA, 22 nt, synthetic construct
  source 1..22: mol_type = other RNA
ctggtggctgagaaccggtgag

SEQ ID NO: 3529 - RNA, 22 nt, synthetic construct
  source 1..22: mol_type = other RNA
ctgtgcgacgccatccgcctcg

SEQ ID NO: 3530 - RNA, 22 nt, synthetic construct
  source 1..22: mol_type = other RNA
ctgtgtcgcttcttcgccatgt

SEQ ID NO: 3531 - RNA, 22 nt, synthetic construct
  source 1..22: mol_type = other RNA
ctgttgcggctgctgcaggcgc

SEQ ID NO: 3532 - RNA, 22 nt, synthetic construct
  source 1..22: mol_type = other RNA
cttcagcgcggacaaggcctgc

SEQ ID NO: 3533 - RNA, 22 nt, synthetic construct
  source 1..22: mol_type = other RNA
cttccaactggtggaggaggcc

SEQ ID NO: 3534 - RNA, 22 nt, synthetic construct
  source 1..22: mol_type = other RNA
cttcgccatgtcgggcccacgg

SEQ ID NO: 3535 - RNA, 22 nt, synthetic construct
  source 1..22: mol_type = other RNA
cttctctccgcctacaagctgt

SEQ ID NO: 3536 - RNA, 22 nt, synthetic construct
  source 1..22: mol_type = other RNA
cttcttcgccatgtcgggccca

SEQ ID NO: 3537 - RNA, 22 nt, synthetic construct
  source 1..22: mol_type = other RNA
cttgtaggcggagagaagcagc

SEQ ID NO: 3538 - RNA, 22 nt, synthetic construct
  source 1..22: mol_type = other RNA
cttgtccgcgctgaagcaggcg

SEQ ID NO: 3539 - RNA, 22 nt, synthetic construct
  source 1..22: mol_type = other RNA
gaaccggtgagcgcgccaggcc

SEQ ID NO: 3540 - RNA, 22 nt, synthetic construct
  source 1..22: mol_type = other RNA
gaagaagcgacacagcttgtag

SEQ ID NO: 3541 - RNA, 22 nt, synthetic construct
  source 1..22: mol_type = other RNA
gaagacctcggccaggccggcg

SEQ ID NO: 3542 - RNA, 22 nt, synthetic construct
  source 1..22: mol_type = other RNA
gaagcagcgtcaggaccatggg

SEQ ID NO: 3543 - RNA, 22 nt, synthetic construct
  source 1..22: mol_type = other RNA
gaagcaggcgggcggcgcgcgg

SEQ ID NO: 3544 - RNA, 22 nt, synthetic construct
  source 1..22: mol_type = other RNA
gaagcgacacagcttgtaggcg

SEQ ID NO: 3545 - RNA, 22 nt, synthetic construct
  source 1..22: mol_type = other RNA
gaagtgtcgccgggggcaggca

SEQ ID NO: 3546 - RNA, 22 nt, synthetic construct
  source 1..22: mol_type = other RNA
gacaaggcctgctgcagctccg

SEQ ID NO: 3547 - RNA, 22 nt, synthetic construct
  source 1..22: mol_type = other RNA
gacacagcttgtaggcggagag

SEQ ID NO: 3548 - RNA, 22 nt, synthetic construct
  source 1..22: mol_type = other RNA
gacatggcgaagaagcgacaca

SEQ ID NO: 3549 - RNA, 22 nt, synthetic construct
  source 1..22: mol_type = other RNA
gacctcggccaggccggcgccc

SEQ ID NO: 3550 - RNA, 22 nt, synthetic construct
  source 1..22: mol_type = other RNA
gacctgctgttgcggctgctgc

SEQ ID NO: 3551 - RNA, 22 nt, synthetic construct
  source 1..22: mol_type = other RNA
gacgccatccgcctcgatggcg

SEQ ID NO: 3552 - RNA, 22 nt, synthetic construct
  source 1..22: mol_type = other RNA
gacgccctggagcgcgcgctgc

SEQ ID NO: 3553 - RNA, 22 nt, synthetic construct
  source 1..22: mol_type = other RNA
gacgcgtgtgcaggccgcgcgc

SEQ ID NO: 3554 - RNA, 22 nt, synthetic construct
  source 1..22: mol_type = other RNA
gacgctgcttctctccgcctac

SEQ ID NO: 3555 - RNA, 22 nt, synthetic construct
  source 1..22: mol_type = other RNA
gagaaccggtgagcgcgccagg

SEQ ID NO: 3556 - RNA, 22 nt, synthetic construct
  source 1..22: mol_type = other RNA
gagaagcagcgtcaggaccatg

SEQ ID NO: 3557 - RNA, 22 nt, synthetic construct
  source 1..22: mol_type = other RNA
gagacgcgtgtgcaggccgcgc

SEQ ID NO: 3558 - RNA, 22 nt, synthetic construct
  source 1..22: mol_type = other RNA
gagagaagcagcgtcaggacca

SEQ ID NO: 3559 - RNA, 22 nt, synthetic construct
  source 1..22: mol_type = other RNA
gagcagatcctggtggctgaga

SEQ ID NO: 3560 - RNA, 22 nt, synthetic construct
  source 1..22: mol_type = other RNA
gagcgcgcgctgccggagctgc

SEQ ID NO: 3561 - RNA, 22 nt, synthetic construct
  source 1..22: mol_type = other RNA
gagcggctggcggtgcctgggc

SEQ ID NO: 3562 - RNA, 22 nt, synthetic construct
  source 1..22: mol_type = other RNA
gagctgcagcaggccttgtccg

SEQ ID NO: 3563 - RNA, 22 nt, synthetic construct
  source 1..22: mol_type = other RNA
gaggccgccatcgaggcggatg

SEQ ID NO: 3564 - RNA, 22 nt, synthetic construct
  source 1..22: mol_type = other RNA
gaggcggatggcgtcgcacaga

SEQ ID NO: 3565 - RNA, 22 nt, synthetic construct
  source 1..22: mol_type = other RNA
gaggtagcccagggtctgtgcg

SEQ ID NO: 3566 - RNA, 22 nt, synthetic construct
  source 1..22: mol_type = other RNA
gaggtcttccaactggtggagg

SEQ ID NO: 3567 - RNA, 22 nt, synthetic construct
  source 1..22: mol_type = other RNA
gaggtgcaggacgccctggagc

SEQ ID NO: 3568 - RNA, 22 nt, synthetic construct
  source 1..22: mol_type = other RNA
gagttggagacgcgtgtgcagg

SEQ ID NO: 3569 - RNA, 22 nt, synthetic construct
  source 1..22: mol_type = other RNA
gatcctggtggctgagaaccgg

SEQ ID NO: 3570 - RNA, 22 nt, synthetic construct
  source 1..22: mol_type = other RNA
gatctgctccagcaggcgcgcg

SEQ ID NO: 3571 - RNA, 22 nt, synthetic construct
  source 1..22: mol_type = other RNA
gatggcggcctcgacctgctgt

SEQ ID NO: 3572 - RNA, 22 nt, synthetic construct
  source 1..22: mol_type = other RNA
gatggcgtcgcacagaccctgg

SEQ ID NO: 3573 - RNA, 22 nt, synthetic construct
  source 1..22: mol_type = other RNA
gatgggggcggtggcacgggcc

SEQ ID NO: 3574 - RNA, 22 nt, synthetic construct
  source 1..22: mol_type = other RNA
gcaacagcaggtcgaggccgcc

SEQ ID NO: 3575 - RNA, 22 nt, synthetic construct
  source 1..22: mol_type = other RNA
gcacacgcgtctccaactccgg

SEQ ID NO: 3576 - RNA, 22 nt, synthetic construct
  source 1..22: mol_type = other RNA
gcacagaccctgggctacctcg

SEQ ID NO: 3577 - RNA, 22 nt, synthetic construct
  source 1..22: mol_type = other RNA
gcaccgaggtgcaggacgccct

SEQ ID NO: 3578 - RNA, 22 nt, synthetic construct
  source 1..22: mol_type = other RNA
gcaccgccagccgctcggcgcc

SEQ ID NO: 3579 - RNA, 22 nt, synthetic construct
  source 1..22: mol_type = other RNA
gcacctcggtgcctgcccccgg

SEQ ID NO: 3580 - RNA, 22 nt, synthetic construct
  source 1..22: mol_type = other RNA
gcagatcctggtggctgagaac

SEQ ID NO: 3581 - RNA, 22 nt, synthetic construct
  source 1..22: mol_type = other RNA
gcagcagccaggcctcctccac

SEQ ID NO: 3582 - RNA, 22 nt, synthetic construct
  source 1..22: mol_type = other RNA
gcagcagccgcaacagcaggtc

SEQ ID NO: 3583 - RNA, 22 nt, synthetic construct
  source 1..22: mol_type = other RNA
gcagcaggccttgtccgcgctg

SEQ ID NO: 3584 - RNA, 22 nt, synthetic construct
  source 1..22: mol_type = other RNA
gcagccaggcctcctccaccag

SEQ ID NO: 3585 - RNA, 22 nt, synthetic construct
  source 1..22: mol_type = other RNA
gcagccgcaacagcaggtcgag

SEQ ID NO: 3586 - RNA, 22 nt, synthetic construct
  source 1..22: mol_type = other RNA
gcagcgcgcgctccagggcgtc

SEQ ID NO: 3587 - RNA, 22 nt, synthetic construct
  source 1..22: mol_type = other RNA
gcagcgtcaggaccatgggcgc

SEQ ID NO: 3588 - RNA, 22 nt, synthetic construct
  source 1..22: mol_type = other RNA
gcagctccggcagcgcgcgctc

SEQ ID NO: 3589 - RNA, 22 nt, synthetic construct
  source 1..22: mol_type = other RNA
gcaggacgccctggagcgcgcg

SEQ ID NO: 3590 - RNA, 22 nt, synthetic construct
  source 1..22: mol_type = other RNA
gcaggcaccgaggtgcaggacg

SEQ ID NO: 3591 - RNA, 22 nt, synthetic construct
  source 1..22: mol_type = other RNA
gcaggccgcgcgcctgctggag

SEQ ID NO: 3592 - RNA, 22 nt, synthetic construct
  source 1..22: mol_type = other RNA
gcaggccttgtccgcgctgaag

SEQ ID NO: 3593 - RNA, 22 nt, synthetic construct
  source 1..22: mol_type = other RNA
gcaggcgccggagttggagacg

SEQ ID NO: 3594 - RNA, 22 nt, synthetic construct
  source 1..22: mol_type = other RNA
gcaggcgcgcggcctgcacacg

SEQ ID NO: 3595 - RNA, 22 nt, synthetic construct
  source 1..22: mol_type = other RNA
gcaggcgggcggcgcgcgggcc

SEQ ID NO: 3596 - RNA, 22 nt, synthetic construct
  source 1..22: mol_type = other RNA
gcaggtcgaggccgccatcgag

SEQ ID NO: 3597 - RNA, 22 nt, synthetic construct
  source 1..22: mol_type = other RNA
gccaccaggatctgctccagca

SEQ ID NO: 3598 - RNA, 22 nt, synthetic construct
  source 1..22: mol_type = other RNA
gccaccgcccccatctggccca

SEQ ID NO: 3599 - RNA, 22 nt, synthetic construct
  source 1..22: mol_type = other RNA
gccagatgggggcggtggcacg

SEQ ID NO: 3600 - RNA, 22 nt, synthetic construct
  source 1..22: mol_type = other RNA
gccagccgctcggcgcccggcc

SEQ ID NO: 3601 - RNA, 22 nt, synthetic construct
  source 1..22: mol_type = other RNA
gccaggccggcgcccacggccc

SEQ ID NO: 3602 - RNA, 22 nt, synthetic construct
  source 1..22: mol_type = other RNA
gccaggcctcctccaccagttg

SEQ ID NO: 3603 - RNA, 22 nt, synthetic construct
  source 1..22: mol_type = other RNA
gccatccgcctcgatggcggcc

SEQ ID NO: 3604 - RNA, 22 nt, synthetic construct
  source 1..22: mol_type = other RNA
gccatcgaggcggatggcgtcg

SEQ ID NO: 3605 - RNA, 22 nt, synthetic construct
  source 1..22: mol_type = other RNA
gccatgtcgggcccacggccgg

SEQ ID NO: 3606 - RNA, 22 nt, synthetic construct
  source 1..22: mol_type = other RNA
gcccaccatgggcccgtgccac

SEQ ID NO: 3607 - RNA, 22 nt, synthetic construct
  source 1..22: mol_type = other RNA
gcccacggcccgcgcgccgccc

SEQ ID NO: 3608 - RNA, 22 nt, synthetic construct
  source 1..22: mol_type = other RNA
gcccacggccgggcgccgagcg

SEQ ID NO: 3609 - RNA, 22 nt, synthetic construct
  source 1..22: mol_type = other RNA
gcccaggcaccgccagccgctc

SEQ ID NO: 3610 - RNA, 22 nt, synthetic construct
  source 1..22: mol_type = other RNA
gcccagggtctgtgcgacgcca

SEQ ID NO: 3611 - RNA, 22 nt, synthetic construct
  source 1..22: mol_type = other RNA
gcccatggtcctgacgctgctt

SEQ ID NO: 3612 - RNA, 22 nt, synthetic construct
  source 1..22: mol_type = other RNA
gcccccatctggcccaggcacc

SEQ ID NO: 3613 - RNA, 22 nt, synthetic construct
  source 1..22: mol_type = other RNA
gcccccggcgacacttcgcggg

SEQ ID NO: 3614 - RNA, 22 nt, synthetic construct
  source 1..22: mol_type = other RNA
gccccgcgaagtgtcgccgggg

SEQ ID NO: 3615 - RNA, 22 nt, synthetic construct
  source 1..22: mol_type = other RNA
gccccgcgcccatggtcctgac

SEQ ID NO: 3616 - RNA, 22 nt, synthetic construct
  source 1..22: mol_type = other RNA
gcccgacatggcgaagaagcga

SEQ ID NO: 3617 - RNA, 22 nt, synthetic construct
  source 1..22: mol_type = other RNA
gcccgcctgcttcagcgcggac

SEQ ID NO: 3618 - RNA, 22 nt, synthetic construct
  source 1..22: mol_type = other RNA
gcccgcgcgccgcccgcctgct

SEQ ID NO: 3619 - RNA, 22 nt, synthetic construct
  source 1..22: mol_type = other RNA
gcccggccgtgggcccgacatg

SEQ ID NO: 3620 - RNA, 22 nt, synthetic construct
  source 1..22: mol_type = other RNA
gcccgtgccaccgcccccatct

SEQ ID NO: 3621 - RNA, 22 nt, synthetic construct
  source 1..22: mol_type = other RNA
gccctggagcgcgcgctgccgg

SEQ ID NO: 3622 - RNA, 22 nt, synthetic construct
  source 1..22: mol_type = other RNA
gccgagcggctggcggtgcctg

SEQ ID NO: 3623 - RNA, 22 nt, synthetic construct
  source 1..22: mol_type = other RNA
gccgaggtcttccaactggtgg

SEQ ID NO: 3624 - RNA, 22 nt, synthetic construct
  source 1..22: mol_type = other RNA
gccgcaacagcaggtcgaggcc

SEQ ID NO: 3625 - RNA, 22 nt, synthetic construct
  source 1..22: mol_type = other RNA
gccgccatcgaggcggatggcg

SEQ ID NO: 3626 - RNA, 22 nt, synthetic construct
  source 1..22: mol_type = other RNA
gccgcccgcctgcttcagcgcg

SEQ ID NO: 3627 - RNA, 22 nt, synthetic construct
  source 1..22: mol_type = other RNA
gccgcgaggtagcccagggtct

SEQ ID NO: 3628 - RNA, 22 nt, synthetic construct
  source 1..22: mol_type = other RNA
gccgcgcgcctgctggagcaga

SEQ ID NO: 3629 - RNA, 22 nt, synthetic construct
  source 1..22: mol_type = other RNA
gccgcgggccccgcgaagtgtc

SEQ ID NO: 3630 - RNA, 22 nt, synthetic construct
  source 1..22: mol_type = other RNA
gccgctcggcgcccggccgtgg

SEQ ID NO: 3631 - RNA, 22 nt, synthetic construct
  source 1..22: mol_type = other RNA
gccggagctgcagcaggccttg

SEQ ID NO: 3632 - RNA, 22 nt, synthetic construct
  source 1..22: mol_type = other RNA
gccggagttggagacgcgtgtg

SEQ ID NO: 3633 - RNA, 22 nt, synthetic construct
  source 1..22: mol_type = other RNA
gccggcctggccgaggtcttcc

SEQ ID NO: 3634 - RNA, 22 nt, synthetic construct
  source 1..22: mol_type = other RNA
gccggcgcccacggcccgcgcg

SEQ ID NO: 3635 - RNA, 22 nt, synthetic construct
  source 1..22: mol_type = other RNA
gccgggcgccgagcggctggcg

SEQ ID NO: 3636 - RNA, 22 nt, synthetic construct
  source 1..22: mol_type = other RNA
gccgggggcaggcaccgaggtg

SEQ ID NO: 3637 - RNA, 22 nt, synthetic construct
  source 1..22: mol_type = other RNA
gccgtgggcccgacatggcgaa

SEQ ID NO: 3638 - RNA, 22 nt, synthetic construct
  source 1..22: mol_type = other RNA
gccgtgggccgcgaggtagccc

SEQ ID NO: 3639 - RNA, 22 nt, synthetic construct
  source 1..22: mol_type = other RNA
gccgtgggcgccggcctggccg

SEQ ID NO: 3640 - RNA, 22 nt, synthetic construct
  source 1..22: mol_type = other RNA
gcctacaagctgtgtcgcttct

SEQ ID NO: 3641 - RNA, 22 nt, synthetic construct
  source 1..22: mol_type = other RNA
gcctcctccaccagttggaaga

SEQ ID NO: 3642 - RNA, 22 nt, synthetic construct
  source 1..22: mol_type = other RNA
gcctcgacctgctgttgcggct

SEQ ID NO: 3643 - RNA, 22 nt, synthetic construct
  source 1..22: mol_type = other RNA
gcctcgatggcggcctcgacct

SEQ ID NO: 3644 - RNA, 22 nt, synthetic construct
  source 1..22: mol_type = other RNA
gcctgcacacgcgtctccaact

SEQ ID NO: 3645 - RNA, 22 nt, synthetic construct
  source 1..22: mol_type = other RNA
gcctgcagcagccgcaacagca

SEQ ID NO: 3646 - RNA, 22 nt, synthetic construct
  source 1..22: mol_type = other RNA
gcctgcccccggcgacacttcg

SEQ ID NO: 3647 - RNA, 22 nt, synthetic construct
  source 1..22: mol_type = other RNA
gcctgctgcagctccggcagcg

SEQ ID NO: 3648 - RNA, 22 nt, synthetic construct
  source 1..22: mol_type = other RNA
gcctgctggagcagatcctggt

SEQ ID NO: 3649 - RNA, 22 nt, synthetic construct
  source 1..22: mol_type = other RNA
gcctgcttcagcgcggacaagg

SEQ ID NO: 3650 - RNA, 22 nt, synthetic construct
  source 1..22: mol_type = other RNA
gcctggccgaggtcttccaact

SEQ ID NO: 3651 - RNA, 22 nt, synthetic construct
  source 1..22: mol_type = other RNA
gcctggcgcgctcaccggttct

SEQ ID NO: 3652 - RNA, 22 nt, synthetic construct
  source 1..22: mol_type = other RNA
gcctgggccagatgggggcggt

SEQ ID NO: 3653 - RNA, 22 nt, synthetic construct
  source 1..22: mol_type = other RNA
gccttgtccgcgctgaagcagg

SEQ ID NO: 3654 - RNA, 22 nt, synthetic construct
  source 1..22: mol_type = other RNA
gcgaagaagcgacacagcttgt

SEQ ID NO: 3655 - RNA, 22 nt, synthetic construct
  source 1..22: mol_type = other RNA
gcgaagtgtcgccgggggcagg

SEQ ID NO: 3656 - RNA, 22 nt, synthetic construct
  source 1..22: mol_type = other RNA
gcgacacagcttgtaggcggag

SEQ ID NO: 3657 - RNA, 22 nt, synthetic construct
  source 1..22: mol_type = other RNA
gcgacacttcgcggggcccgcg

SEQ ID NO: 3658 - RNA, 22 nt, synthetic construct
  source 1..22: mol_type = other RNA
gcgacgccatccgcctcgatgg

SEQ ID NO: 3659 - RNA, 22 nt, synthetic construct
  source 1..22: mol_type = other RNA
gcgaggtagcccagggtctgtg

SEQ ID NO: 3660 - RNA, 22 nt, synthetic construct
  source 1..22: mol_type = other RNA
gcgcccacggcccgcgcgccgc

SEQ ID NO: 3661 - RNA, 22 nt, synthetic construct
  source 1..22: mol_type = other RNA
gcgcccatggtcctgacgctgc

SEQ ID NO: 3662 - RNA, 22 nt, synthetic construct
  source 1..22: mol_type = other RNA
gcgcccggccgtgggcccgaca

SEQ ID NO: 3663 - RNA, 22 nt, synthetic construct
  source 1..22: mol_type = other RNA
gcgccgagcggctggcggtgcc

SEQ ID NO: 3664 - RNA, 22 nt, synthetic construct
  source 1..22: mol_type = other RNA
gcgccgcccgcctgcttcagcg

SEQ ID NO: 3665 - RNA, 22 nt, synthetic construct
  source 1..22: mol_type = other RNA
gcgccggagttggagacgcgtg

SEQ ID NO: 3666 - RNA, 22 nt, synthetic construct
  source 1..22: mol_type = other RNA
gcgccggcctggccgaggtctt

SEQ ID NO: 3667 - RNA, 22 nt, synthetic construct
  source 1..22: mol_type = other RNA
gcgcctgcagcagccgcaacag

SEQ ID NO: 3668 - RNA, 22 nt, synthetic construct
  source 1..22: mol_type = other RNA
gcgcctgctggagcagatcctg

SEQ ID NO: 3669 - RNA, 22 nt, synthetic construct
  source 1..22: mol_type = other RNA
gcgcgccgcccgcctgcttcag

SEQ ID NO: 3670 - RNA, 22 nt, synthetic construct
  source 1..22: mol_type = other RNA
gcgcgcctgctggagcagatcc

SEQ ID NO: 3671 - RNA, 22 nt, synthetic construct
  source 1..22: mol_type = other RNA
gcgcgcgctccagggcgtcctg

SEQ ID NO: 3672 - RNA, 22 nt, synthetic construct
  source 1..22: mol_type = other RNA
gcgcgcgctgccggagctgcag

SEQ ID NO: 3673 - RNA, 22 nt, synthetic construct
  source 1..22: mol_type = other RNA
gcgcgcggcctgcacacgcgtc

SEQ ID NO: 3674 - RNA, 22 nt, synthetic construct
  source 1..22: mol_type = other RNA
gcgcgcgggccgtgggcgccgg

SEQ ID NO: 3675 - RNA, 22 nt, synthetic construct
  source 1..22: mol_type = other RNA
gcgcgctcaccggttctcagcc

SEQ ID NO: 3676 - RNA, 22 nt, synthetic construct
  source 1..22: mol_type = other RNA
gcgcgctccagggcgtcctgca

SEQ ID NO: 3677 - RNA, 22 nt, synthetic construct
  source 1..22: mol_type = other RNA
gcgcgctgccggagctgcagca

SEQ ID NO: 3678 - RNA, 22 nt, synthetic construct
  source 1..22: mol_type = other RNA
gcgcggacaaggcctgctgcag

SEQ ID NO: 3679 - RNA, 22 nt, synthetic construct
  source 1..22: mol_type = other RNA
gcgcggcctgcacacgcgtctc

SEQ ID NO: 3680 - RNA, 22 nt, synthetic construct
  source 1..22: mol_type = other RNA
gcgcgggccgtgggcgccggcc

SEQ ID NO: 3681 - RNA, 22 nt, synthetic construct
  source 1..22: mol_type = other RNA
gcgctcaccggttctcagccac

SEQ ID NO: 3682 - RNA, 22 nt, synthetic construct
  source 1..22: mol_type = other RNA
gcgctccagggcgtcctgcacc

SEQ ID NO: 3683 - RNA, 22 nt, synthetic construct
  source 1..22: mol_type = other RNA
gcgctgaagcaggcgggcggcg

SEQ ID NO: 3684 - RNA, 22 nt, synthetic construct
  source 1..22: mol_type = other RNA
gcgctgccggagctgcagcagg

SEQ ID NO: 3685 - RNA, 22 nt, synthetic construct
  source 1..22: mol_type = other RNA
gcggacaaggcctgctgcagct

SEQ ID NO: 3686 - RNA, 22 nt, synthetic construct
  source 1..22: mol_type = other RNA
gcggagagaagcagcgtcagga

SEQ ID NO: 3687 - RNA, 22 nt, synthetic construct
  source 1..22: mol_type = other RNA
gcggatggcgtcgcacagaccc

SEQ ID NO: 3688 - RNA, 22 nt, synthetic construct
  source 1..22: mol_type = other RNA
gcggccccgcgcccatggtcct

SEQ ID NO: 3689 - RNA, 22 nt, synthetic construct
  source 1..22: mol_type = other RNA
gcggcctcgacctgctgttgcg

SEQ ID NO: 3690 - RNA, 22 nt, synthetic construct
  source 1..22: mol_type = other RNA
gcggcctgcacacgcgtctcca

SEQ ID NO: 3691 - RNA, 22 nt, synthetic construct
  source 1..22: mol_type = other RNA
gcggcgcgcgggccgtgggcgc

SEQ ID NO: 3692 - RNA, 22 nt, synthetic construct
  source 1..22: mol_type = other RNA
gcggctgctgcaggcgccggag

SEQ ID NO: 3693 - RNA, 22 nt, synthetic construct
  source 1..22: mol_type = other RNA
gcggctggcggtgcctgggcca

SEQ ID NO: 3694 - RNA, 22 nt, synthetic construct
  source 1..22: mol_type = other RNA
gcgggccccgcgaagtgtcgcc

SEQ ID NO: 3695 - RNA, 22 nt, synthetic construct
  source 1..22: mol_type = other RNA
gcgggccgtgggcgccggcctg

SEQ ID NO: 3696 - RNA, 22 nt, synthetic construct
  source 1..22: mol_type = other RNA
gcgggcggcgcgcgggccgtgg

SEQ ID NO: 3697 - RNA, 22 nt, synthetic construct
  source 1..22: mol_type = other RNA
gcggtgcctgggccagatgggg

SEQ ID NO: 3698 - RNA, 22 nt, synthetic construct
  source 1..22: mol_type = other RNA
gcgtcaggaccatgggcgcggg

SEQ ID NO: 3699 - RNA, 22 nt, synthetic construct
  source 1..22: mol_type = other RNA
gcgtcctgcacctcggtgcctg

SEQ ID NO: 3700 - RNA, 22 nt, synthetic construct
  source 1..22: mol_type = other RNA
gcgtcgcacagaccctgggcta

SEQ ID NO: 3701 - RNA, 22 nt, synthetic construct
  source 1..22: mol_type = other RNA
gcgtctccaactccggcgcctg

SEQ ID NO: 3702 - RNA, 22 nt, synthetic construct
  source 1..22: mol_type = other RNA
gcgtgtgcaggccgcgcgcctg

SEQ ID NO: 3703 - RNA, 22 nt, synthetic construct
  source 1..22: mol_type = other RNA
gctcaccggttctcagccacca

SEQ ID NO: 3704 - RNA, 22 nt, synthetic construct
  source 1..22: mol_type = other RNA
gctccagcaggcgcgcggcctg

SEQ ID NO: 3705 - RNA, 22 nt, synthetic construct
  source 1..22: mol_type = other RNA
gctccagggcgtcctgcacctc

SEQ ID NO: 3706 - RNA, 22 nt, synthetic construct
  source 1..22: mol_type = other RNA
gctccggcagcgcgcgctccag

SEQ ID NO: 3707 - RNA, 22 nt, synthetic construct
  source 1..22: mol_type = other RNA
gctcggcgcccggccgtgggcc

SEQ ID NO: 3708 - RNA, 22 nt, synthetic construct
  source 1..22: mol_type = other RNA
gctctcccaaccccggcctggc

SEQ ID NO: 3709 - RNA, 22 nt, synthetic construct
  source 1..22: mol_type = other RNA
gctgaagcaggcgggcggcgcg

SEQ ID NO: 3710 - RNA, 22 nt, synthetic construct
  source 1..22: mol_type = other RNA
gctgagaaccggtgagcgcgcc

SEQ ID NO: 3711 - RNA, 22 nt, synthetic construct
  source 1..22: mol_type = other RNA
gctgcagcaggccttgtccgcg

SEQ ID NO: 3712 - RNA, 22 nt, synthetic construct
  source 1..22: mol_type = other RNA
gctgcagctccggcagcgcgcg

SEQ ID NO: 3713 - RNA, 22 nt, synthetic construct
  source 1..22: mol_type = other RNA
gctgcaggcgccggagttggag

SEQ ID NO: 3714 - RNA, 22 nt, synthetic construct
  source 1..22: mol_type = other RNA
gctgccggagctgcagcaggcc

SEQ ID NO: 3715 - RNA, 22 nt, synthetic construct
  source 1..22: mol_type = other RNA
gctgctgcaggcgccggagttg

SEQ ID NO: 3716 - RNA, 22 nt, synthetic construct
  source 1..22: mol_type = other RNA
gctgcttctctccgcctacaag

SEQ ID NO: 3717 - RNA, 22 nt, synthetic construct
  source 1..22: mol_type = other RNA
gctggagcagatcctggtggct

SEQ ID NO: 3718 - RNA, 22 nt, synthetic construct
  source 1..22: mol_type = other RNA
gctggcggtgcctgggccagat

SEQ ID NO: 3719 - RNA, 22 nt, synthetic construct
  source 1..22: mol_type = other RNA
gctgtgtcgcttcttcgccatg

SEQ ID NO: 3720 - RNA, 22 nt, synthetic construct
  source 1..22: mol_type = other RNA
gctgttgcggctgctgcaggcg

SEQ ID NO: 3721 - RNA, 22 nt, synthetic construct
  source 1..22: mol_type = other RNA
gcttcagcgcggacaaggcctg

SEQ ID NO: 3722 - RNA, 22 nt, synthetic construct
  source 1..22: mol_type = other RNA
gcttctctccgcctacaagctg

SEQ ID NO: 3723 - RNA, 22 nt, synthetic construct
  source 1..22: mol_type = other RNA
gcttcttcgccatgtcgggccc

SEQ ID NO: 3724 - RNA, 22 nt, synthetic construct
  source 1..22: mol_type = other RNA
gcttgtaggcggagagaagcag

SEQ ID NO: 3725 - RNA, 22 nt, synthetic construct
  source 1..22: mol_type = other RNA
ggaagacctcggccaggccggc

SEQ ID NO: 3726 - RNA, 22 nt, synthetic construct
  source 1..22: mol_type = other RNA
ggacaaggcctgctgcagctcc

SEQ ID NO: 3727 - RNA, 22 nt, synthetic construct
  source 1..22: mol_type = other RNA
ggaccatgggcgcggggccgcg

SEQ ID NO: 3728 - RNA, 22 nt, synthetic construct
  source 1..22: mol_type = other RNA
ggacgccctggagcgcgcgctg

SEQ ID NO: 3729 - RNA, 22 nt, synthetic construct
  source 1..22: mol_type = other RNA
ggagacgcgtgtgcaggccgcg

SEQ ID NO: 3730 - RNA, 22 nt, synthetic construct
  source 1..22: mol_type = other RNA
ggagagaagcagcgtcaggacc

SEQ ID NO: 3731 - RNA, 22 nt, synthetic construct
  source 1..22: mol_type = other RNA
ggagcagatcctggtggctgag

SEQ ID NO: 3732 - RNA, 22 nt, synthetic construct
  source 1..22: mol_type = other RNA
ggagcgcgcgctgccggagctg

SEQ ID NO: 3733 - RNA, 22 nt, synthetic construct
  source 1..22: mol_type = other RNA
ggagctgcagcaggccttgtcc

SEQ ID NO: 3734 - RNA, 22 nt, synthetic construct
  source 1..22: mol_type = other RNA
ggagttggagacgcgtgtgcag

SEQ ID NO: 3735 - RNA, 22 nt, synthetic construct
  source 1..22: mol_type = other RNA
ggatctgctccagcaggcgcgc

SEQ ID NO: 3736 - RNA, 22 nt, synthetic construct
  source 1..22: mol_type = other RNA
ggatggcgtcgcacagaccctg

SEQ ID NO: 3737 - RNA, 22 nt, synthetic construct
  source 1..22: mol_type = other RNA
ggcaccgaggtgcaggacgccc

SEQ ID NO: 3738 - RNA, 22 nt, synthetic construct
  source 1..22: mol_type = other RNA
ggcaccgccagccgctcggcgc

SEQ ID NO: 3739 - RNA, 22 nt, synthetic construct
  source 1..22: mol_type = other RNA
ggcagcgcgcgctccagggcgt

SEQ ID NO: 3740 - RNA, 22 nt, synthetic construct
  source 1..22: mol_type = other RNA
ggcaggcaccgaggtgcaggac

SEQ ID NO: 3741 - RNA, 22 nt, synthetic construct
  source 1..22: mol_type = other RNA
ggccagatgggggcggtggcac

SEQ ID NO: 3742 - RNA, 22 nt, synthetic construct
  source 1..22: mol_type = other RNA
ggccaggccggcgcccacggcc

SEQ ID NO: 3743 - RNA, 22 nt, synthetic construct
  source 1..22: mol_type = other RNA
ggcccacggccgggcgccgagc

SEQ ID NO: 3744 - RNA, 22 nt, synthetic construct
  source 1..22: mol_type = other RNA
ggcccaggcaccgccagccgct

SEQ ID NO: 3745 - RNA, 22 nt, synthetic construct
  source 1..22: mol_type = other RNA
ggccccgcgaagtgtcgccggg

SEQ ID NO: 3746 - RNA, 22 nt, synthetic construct
  source 1..22: mol_type = other RNA
ggccccgcgcccatggtcctga

SEQ ID NO: 3747 - RNA, 22 nt, synthetic construct
  source 1..22: mol_type = other RNA
ggcccgacatggcgaagaagcg

SEQ ID NO: 3748 - RNA, 22 nt, synthetic construct
  source 1..22: mol_type = other RNA
ggcccgcgcgccgcccgcctgc

SEQ ID NO: 3749 - RNA, 22 nt, synthetic construct
  source 1..22: mol_type = other RNA
ggcccgtgccaccgcccccatc

SEQ ID NO: 3750 - RNA, 22 nt, synthetic construct
  source 1..22: mol_type = other RNA
ggccgaggtcttccaactggtg

SEQ ID NO: 3751 - RNA, 22 nt, synthetic construct
  source 1..22: mol_type = other RNA
ggccgccatcgaggcggatggc

SEQ ID NO: 3752 - RNA, 22 nt, synthetic construct
  source 1..22: mol_type = other RNA
ggccgcgaggtagcccagggtc

SEQ ID NO: 3753 - RNA, 22 nt, synthetic construct
  source 1..22: mol_type = other RNA
ggccgcgcgcctgctggagcag

SEQ ID NO: 3754 - RNA, 22 nt, synthetic construct
  source 1..22: mol_type = other RNA
ggccgcgggccccgcgaagtgt

SEQ ID NO: 3755 - RNA, 22 nt, synthetic construct
  source 1..22: mol_type = other RNA
ggccggcgcccacggcccgcgc

SEQ ID NO: 3756 - RNA, 22 nt, synthetic construct
  source 1..22: mol_type = other RNA
ggccgggcgccgagcggctggc

SEQ ID NO: 3757 - RNA, 22 nt, synthetic construct
  source 1..22: mol_type = other RNA
ggccgtgggcccgacatggcga

SEQ ID NO: 3758 - RNA, 22 nt, synthetic construct
  source 1..22: mol_type = other RNA
ggccgtgggccgcgaggtagcc

SEQ ID NO: 3759 - RNA, 22 nt, synthetic construct
  source 1..22: mol_type = other RNA
ggccgtgggcgccggcctggcc

SEQ ID NO: 3760 - RNA, 22 nt, synthetic construct
  source 1..22: mol_type = other RNA
ggcctcctccaccagttggaag

SEQ ID NO: 3761 - RNA, 22 nt, synthetic construct
  source 1..22: mol_type = other RNA
ggcctcgacctgctgttgcggc

SEQ ID NO: 3762 - RNA, 22 nt, synthetic construct
  source 1..22: mol_type = other RNA
ggcctgcacacgcgtctccaac

SEQ ID NO: 3763 - RNA, 22 nt, synthetic construct
  source 1..22: mol_type = other RNA
ggcctgctgcagctccggcagc

SEQ ID NO: 3764 - RNA, 22 nt, synthetic construct
  source 1..22: mol_type = other RNA
ggcctggccgaggtcttccaac

SEQ ID NO: 3765 - RNA, 22 nt, synthetic construct
  source 1..22: mol_type = other RNA
ggcctggcgcgctcaccggttc

SEQ ID NO: 3766 - RNA, 22 nt, synthetic construct
  source 1..22: mol_type = other RNA
ggccttgtccgcgctgaagcag

SEQ ID NO: 3767 - RNA, 22 nt, synthetic construct
  source 1..22: mol_type = other RNA
ggcgaagaagcgacacagcttg

SEQ ID NO: 3768 - RNA, 22 nt, synthetic construct
  source 1..22: mol_type = other RNA
ggcgacacttcgcggggcccgc

SEQ ID NO: 3769 - RNA, 22 nt, synthetic construct
  source 1..22: mol_type = other RNA
ggcgcccacggcccgcgcgccg

SEQ ID NO: 3770 - RNA, 22 nt, synthetic construct
  source 1..22: mol_type = other RNA
ggcgcccggccgtgggcccgac

SEQ ID NO: 3771 - RNA, 22 nt, synthetic construct
  source 1..22: mol_type = other RNA
ggcgccgagcggctggcggtgc

SEQ ID NO: 3772 - RNA, 22 nt, synthetic construct
  source 1..22: mol_type = other RNA
ggcgccggagttggagacgcgt

SEQ ID NO: 3773 - RNA, 22 nt, synthetic construct
  source 1..22: mol_type = other RNA
ggcgccggcctggccgaggtct

SEQ ID NO: 3774 - RNA, 22 nt, synthetic construct
  source 1..22: mol_type = other RNA
ggcgcctgcagcagccgcaaca

SEQ ID NO: 3775 - RNA, 22 nt, synthetic construct
  source 1..22: mol_type = other RNA
ggcgcgcggcctgcacacgcgt

SEQ ID NO: 3776 - RNA, 22 nt, synthetic construct
  source 1..22: mol_type = other RNA
ggcgcgcgggccgtgggcgccg

SEQ ID NO: 3777 - RNA, 22 nt, synthetic construct
  source 1..22: mol_type = other RNA
ggcgcgctcaccggttctcagc

SEQ ID NO: 3778 - RNA, 22 nt, synthetic construct
  source 1..22: mol_type = other RNA
ggcggagagaagcagcgtcagg

SEQ ID NO: 3779 - RNA, 22 nt, synthetic construct
  source 1..22: mol_type = other RNA
ggcggatggcgtcgcacagacc

SEQ ID NO: 3780 - RNA, 22 nt, synthetic construct
  source 1..22: mol_type = other RNA
ggcggcctcgacctgctgttgc

SEQ ID NO: 3781 - RNA, 22 nt, synthetic construct
  source 1..22: mol_type = other RNA
ggcggcgcgcgggccgtgggcg

SEQ ID NO: 3782 - RNA, 22 nt, synthetic construct
  source 1..22: mol_type = other RNA
ggcgggcggcgcgcgggccgtg

SEQ ID NO: 3783 - RNA, 22 nt, synthetic construct
  source 1..22: mol_type = other RNA
ggcggtgcctgggccagatggg

SEQ ID NO: 3784 - RNA, 22 nt, synthetic construct
  source 1..22: mol_type = other RNA
ggcgtcctgcacctcggtgcct

SEQ ID NO: 3785 - RNA, 22 nt, synthetic construct
  source 1..22: mol_type = other RNA
ggcgtcgcacagaccctgggct

SEQ ID NO: 3786 - RNA, 22 nt, synthetic construct
  source 1..22: mol_type = other RNA
ggctgagaaccggtgagcgcgc

SEQ ID NO: 3787 - RNA, 22 nt, synthetic construct
  source 1..22: mol_type = other RNA
ggctgctgcaggcgccggagtt

SEQ ID NO: 3788 - RNA, 22 nt, synthetic construct
  source 1..22: mol_type = other RNA
ggctggcggtgcctgggccaga

SEQ ID NO: 3789 - RNA, 22 nt, synthetic construct
  source 1..22: mol_type = other RNA
gggcaggcaccgaggtgcagga

SEQ ID NO: 3790 - RNA, 22 nt, synthetic construct
  source 1..22: mol_type = other RNA
gggccagatgggggcggtggca

SEQ ID NO: 3791 - RNA, 22 nt, synthetic construct
  source 1..22: mol_type = other RNA
gggcccacggccgggcgccgag

SEQ ID NO: 3792 - RNA, 22 nt, synthetic construct
  source 1..22: mol_type = other RNA
gggccccgcgaagtgtcgccgg

SEQ ID NO: 3793 - RNA, 22 nt, synthetic construct
  source 1..22: mol_type = other RNA
gggcccgacatggcgaagaagc

SEQ ID NO: 3794 - RNA, 22 nt, synthetic construct
  source 1..22: mol_type = other RNA
gggcccgtgccaccgcccccat

SEQ ID NO: 3795 - RNA, 22 nt, synthetic construct
  source 1..22: mol_type = other RNA
gggccgcgaggtagcccagggt

SEQ ID NO: 3796 - RNA, 22 nt, synthetic construct
  source 1..22: mol_type = other RNA
gggccgtgggcgccggcctggc

SEQ ID NO: 3797 - RNA, 22 nt, synthetic construct
  source 1..22: mol_type = other RNA
gggcgccgagcggctggcggtg

SEQ ID NO: 3798 - RNA, 22 nt, synthetic construct
  source 1..22: mol_type = other RNA
gggcgccggcctggccgaggtc

SEQ ID NO: 3799 - RNA, 22 nt, synthetic construct
  source 1..22: mol_type = other RNA
gggcggcgcgcgggccgtgggc

SEQ ID NO: 3800 - RNA, 22 nt, synthetic construct
  source 1..22: mol_type = other RNA
gggcgtcctgcacctcggtgcc

SEQ ID NO: 3801 - RNA, 22 nt, synthetic construct
  source 1..22: mol_type = other RNA
ggggcaggcaccgaggtgcagg

SEQ ID NO: 3802 - RNA, 22 nt, synthetic construct
  source 1..22: mol_type = other RNA
gggggcaggcaccgaggtgcag

SEQ ID NO: 3803 - RNA, 22 nt, synthetic construct
  source 1..22: mol_type = other RNA
gggggcggtggcacgggcccat

SEQ ID NO: 3804 - RNA, 22 nt, synthetic construct
  source 1..22: mol_type = other RNA
gggtctgtgcgacgccatccgc

SEQ ID NO: 3805 - RNA, 22 nt, synthetic construct
  source 1..22: mol_type = other RNA
gggtggccgcgggccccgcgaa

SEQ ID NO: 3806 - RNA, 22 nt, synthetic construct
  source 1..22: mol_type = other RNA
ggtagcccagggtctgtgcgac

SEQ ID NO: 3807 - RNA, 22 nt, synthetic construct
  source 1..22: mol_type = other RNA
ggtcctgacgctgcttctctcc

SEQ ID NO: 3808 - RNA, 22 nt, synthetic construct
  source 1..22: mol_type = other RNA
ggtcgaggccgccatcgaggcg

SEQ ID NO: 3809 - RNA, 22 nt, synthetic construct
  source 1..22: mol_type = other RNA
ggtctgtgcgacgccatccgcc

SEQ ID NO: 3810 - RNA, 22 nt, synthetic construct
  source 1..22: mol_type = other RNA
ggtcttccaactggtggaggag

SEQ ID NO: 3811 - RNA, 22 nt, synthetic construct
  source 1..22: mol_type = other RNA
ggtgagcgcgccaggccggggt

SEQ ID NO: 3812 - RNA, 22 nt, synthetic construct
  source 1..22: mol_type = other RNA
ggtgcaggacgccctggagcgc

SEQ ID NO: 3813 - RNA, 22 nt, synthetic construct
  source 1..22: mol_type = other RNA
ggtgcctgcccccggcgacact

SEQ ID NO: 3814 - RNA, 22 nt, synthetic construct
  source 1..22: mol_type = other RNA
ggtgcctgggccagatgggggc

SEQ ID NO: 3815 - RNA, 22 nt, synthetic construct
  source 1..22: mol_type = other RNA
ggtggccgcgggccccgcgaag

SEQ ID NO: 3816 - RNA, 22 nt, synthetic construct
  source 1..22: mol_type = other RNA
ggtggctgagaaccggtgagcg

SEQ ID NO: 3817 - RNA, 22 nt, synthetic construct
  source 1..22: mol_type = other RNA
ggttctcagccaccaggatctg

SEQ ID NO: 3818 - RNA, 22 nt, synthetic construct
  source 1..22: mol_type = other RNA
gtagcccagggtctgtgcgacg

SEQ ID NO: 3819 - RNA, 22 nt, synthetic construct
  source 1..22: mol_type = other RNA
gtaggcggagagaagcagcgtc

SEQ ID NO: 3820 - RNA, 22 nt, synthetic construct
  source 1..22: mol_type = other RNA
gtcaggaccatgggcgcggggc

SEQ ID NO: 3821 - RNA, 22 nt, synthetic construct
  source 1..22: mol_type = other RNA
gtcccccgcggccccgcgccca

SEQ ID NO: 3822 - RNA, 22 nt, synthetic construct
  source 1..22: mol_type = other RNA
gtccgcgctgaagcaggcgggc

SEQ ID NO: 3823 - RNA, 22 nt, synthetic construct
  source 1..22: mol_type = other RNA
gtcctgacgctgcttctctccg

SEQ ID NO: 3824 - RNA, 22 nt, synthetic construct
  source 1..22: mol_type = other RNA
gtcctgcacctcggtgcctgcc

SEQ ID NO: 3825 - RNA, 22 nt, synthetic construct
  source 1..22: mol_type = other RNA
gtcgaggccgccatcgaggcgg

SEQ ID NO: 3826 - RNA, 22 nt, synthetic construct
  source 1..22: mol_type = other RNA
gtcgcacagaccctgggctacc

SEQ ID NO: 3827 - RNA, 22 nt, synthetic construct
  source 1..22: mol_type = other RNA
gtcgccgggggcaggcaccgag

SEQ ID NO: 3828 - RNA, 22 nt, synthetic construct
  source 1..22: mol_type = other RNA
gtcgcttcttcgccatgtcggg

SEQ ID NO: 3829 - RNA, 22 nt, synthetic construct
  source 1..22: mol_type = other RNA
gtcgggcccacggccgggcgcc

SEQ ID NO: 3830 - RNA, 22 nt, synthetic construct
  source 1..22: mol_type = other RNA
gtctccaactccggcgcctgca

SEQ ID NO: 3831 - RNA, 22 nt, synthetic construct
  source 1..22: mol_type = other RNA
gtctgtgcgacgccatccgcct

SEQ ID NO: 3832 - RNA, 22 nt, synthetic construct
  source 1..22: mol_type = other RNA
gtcttccaactggtggaggagg

SEQ ID NO: 3833 - RNA, 22 nt, synthetic construct
  source 1..22: mol_type = other RNA
gtgagcgcgccaggccggggtt

SEQ ID NO: 3834 - RNA, 22 nt, synthetic construct
  source 1..22: mol_type = other RNA
gtgcaggacgccctggagcgcg

SEQ ID NO: 3835 - RNA, 22 nt, synthetic construct
  source 1..22: mol_type = other RNA
gtgcaggccgcgcgcctgctgg

SEQ ID NO: 3836 - RNA, 22 nt, synthetic construct
  source 1..22: mol_type = other RNA
gtgccaccgcccccatctggcc

SEQ ID NO: 3837 - RNA, 22 nt, synthetic construct
  source 1..22: mol_type = other RNA
gtgcctgcccccggcgacactt

SEQ ID NO: 3838 - RNA, 22 nt, synthetic construct
  source 1..22: mol_type = other RNA
gtgcctgggccagatgggggcg

SEQ ID NO: 3839 - RNA, 22 nt, synthetic construct
  source 1..22: mol_type = other RNA
gtgcgacgccatccgcctcgat

SEQ ID NO: 3840 - RNA, 22 nt, synthetic construct
  source 1..22: mol_type = other RNA
gtggccgcgggccccgcgaagt

SEQ ID NO: 3841 - RNA, 22 nt, synthetic construct
  source 1..22: mol_type = other RNA
gtggctgagaaccggtgagcgc

SEQ ID NO: 3842 - RNA, 22 nt, synthetic construct
  source 1..22: mol_type = other RNA
gtgggcccgacatggcgaagaa

SEQ ID NO: 3843 - RNA, 22 nt, synthetic construct
  source 1..22: mol_type = other RNA
gtgggccgcgaggtagcccagg

SEQ ID NO: 3844 - RNA, 22 nt, synthetic construct
  source 1..22: mol_type = other RNA
gtgggcgccggcctggccgagg

SEQ ID NO: 3845 - RNA, 22 nt, synthetic construct
  source 1..22: mol_type = other RNA
gtgtcgccgggggcaggcaccg

SEQ ID NO: 3846 - RNA, 22 nt, synthetic construct
  source 1..22: mol_type = other RNA
gtgtcgcttcttcgccatgtcg

SEQ ID NO: 3847 - RNA, 22 nt, synthetic construct
  source 1..22: mol_type = other RNA
gtgtgcaggccgcgcgcctgct

SEQ ID NO: 3848 - RNA, 22 nt, synthetic construct
  source 1..22: mol_type = other RNA
gttctcagccaccaggatctgc

SEQ ID NO: 3849 - RNA, 22 nt, synthetic construct
  source 1..22: mol_type = other RNA
gttgcggctgctgcaggcgccg

SEQ ID NO: 3850 - RNA, 22 nt, synthetic construct
  source 1..22: mol_type = other RNA
gttggaagacctcggccaggcc

SEQ ID NO: 3851 - RNA, 22 nt, synthetic construct
  source 1..22: mol_type = other RNA
gttggagacgcgtgtgcaggcc

SEQ ID NO: 3852 - RNA, 22 nt, synthetic construct
  source 1..22: mol_type = other RNA
tacaagctgtgtcgcttcttcg

SEQ ID NO: 3853 - RNA, 22 nt, synthetic construct
  source 1..22: mol_type = other RNA
tagcccagggtctgtgcgacgc

SEQ ID NO: 3854 - RNA, 22 nt, synthetic construct
  source 1..22: mol_type = other RNA
taggcggagagaagcagcgtca

SEQ ID NO: 3855 - RNA, 22 nt, synthetic construct
  source 1..22: mol_type = other RNA
tcaccggttctcagccaccagg

SEQ ID NO: 3856 - RNA, 22 nt, synthetic construct
  source 1..22: mol_type = other RNA
tcagccaccaggatctgctcca

SEQ ID NO: 3857 - RNA, 22 nt, synthetic construct
  source 1..22: mol_type = other RNA
tcagcgcggacaaggcctgctg

SEQ ID NO: 3858 - RNA, 22 nt, synthetic construct
  source 1..22: mol_type = other RNA
tcaggaccatgggcgcggggcc

SEQ ID NO: 3859 - RNA, 22 nt, synthetic construct
  source 1..22: mol_type = other RNA
tccaactccggcgcctgcagca

SEQ ID NO: 3860 - RNA, 22 nt, synthetic construct
  source 1..22: mol_type = other RNA
tccaactggtggaggaggcctg

SEQ ID NO: 3861 - RNA, 22 nt, synthetic construct
  source 1..22: mol_type = other RNA
tccaccagttggaagacctcgg

SEQ ID NO: 3862 - RNA, 22 nt, synthetic construct
  source 1..22: mol_type = other RNA
tccagcaggcgcgcggcctgca

SEQ ID NO: 3863 - RNA, 22 nt, synthetic construct
  source 1..22: mol_type = other RNA
tccagggcgtcctgcacctcgg

SEQ ID NO: 3864 - RNA, 22 nt, synthetic construct
  source 1..22: mol_type = other RNA
tcccaaccccggcctggcgcgc

SEQ ID NO: 3865 - RNA, 22 nt, synthetic construct
  source 1..22: mol_type = other RNA
tcccccgcggccccgcgcccat

SEQ ID NO: 3866 - RNA, 22 nt, synthetic construct
  source 1..22: mol_type = other RNA
tccgcctacaagctgtgtcgct

SEQ ID NO: 3867 - RNA, 22 nt, synthetic construct
  source 1..22: mol_type = other RNA
tccgcctcgatggcggcctcga

SEQ ID NO: 3868 - RNA, 22 nt, synthetic construct
  source 1..22: mol_type = other RNA
tccgcgctgaagcaggcgggcg

SEQ ID NO: 3869 - RNA, 22 nt, synthetic construct
  source 1..22: mol_type = other RNA
tccggcagcgcgcgctccaggg

SEQ ID NO: 3870 - RNA, 22 nt, synthetic construct
  source 1..22: mol_type = other RNA
tccggcgcctgcagcagccgca

SEQ ID NO: 3871 - RNA, 22 nt, synthetic construct
  source 1..22: mol_type = other RNA
tcctccaccagttggaagacct

SEQ ID NO: 3872 - RNA, 22 nt, synthetic construct
  source 1..22: mol_type = other RNA
tcctgacgctgcttctctccgc

SEQ ID NO: 3873 - RNA, 22 nt, synthetic construct
  source 1..22: mol_type = other RNA
tcctgcacctcggtgcctgccc

SEQ ID NO: 3874 - RNA, 22 nt, synthetic construct
  source 1..22: mol_type = other RNA
tcctggtggctgagaaccggtg

SEQ ID NO: 3875 - RNA, 22 nt, synthetic construct
  source 1..22: mol_type = other RNA
tcgacctgctgttgcggctgct

SEQ ID NO: 3876 - RNA, 22 nt, synthetic construct
  source 1..22: mol_type = other RNA
tcgaggccgccatcgaggcgga

SEQ ID NO: 3877 - RNA, 22 nt, synthetic construct
  source 1..22: mol_type = other RNA
tcgaggcggatggcgtcgcaca

SEQ ID NO: 3878 - RNA, 22 nt, synthetic construct
  source 1..22: mol_type = other RNA
tcgatggcggcctcgacctgct

SEQ ID NO: 3879 - RNA, 22 nt, synthetic construct
  source 1..22: mol_type = other RNA
tcgcacagaccctgggctacct

SEQ ID NO: 3880 - RNA, 22 nt, synthetic construct
  source 1..22: mol_type = other RNA
tcgccatgtcgggcccacggcc

SEQ ID NO: 3881 - RNA, 22 nt, synthetic construct
  source 1..22: mol_type = other RNA
tcgccgggggcaggcaccgagg

SEQ ID NO: 3882 - RNA, 22 nt, synthetic construct
  source 1..22: mol_type = other RNA
tcgcttcttcgccatgtcgggc

SEQ ID NO: 3883 - RNA, 22 nt, synthetic construct
  source 1..22: mol_type = other RNA
tcggccaggccggcgcccacgg

SEQ ID NO: 3884 - RNA, 22 nt, synthetic construct
  source 1..22: mol_type = other RNA
tcggcgcccggccgtgggcccg

SEQ ID NO: 3885 - RNA, 22 nt, synthetic construct
  source 1..22: mol_type = other RNA
tcgggcccacggccgggcgccg

SEQ ID NO: 3886 - RNA, 22 nt, synthetic construct
  source 1..22: mol_type = other RNA
tcggtgcctgcccccggcgaca

SEQ ID NO: 3887 - RNA, 22 nt, synthetic construct
  source 1..22: mol_type = other RNA
tctcagccaccaggatctgctc

SEQ ID NO: 3888 - RNA, 22 nt, synthetic construct
  source 1..22: mol_type = other RNA
tctccaactccggcgcctgcag

SEQ ID NO: 3889 - RNA, 22 nt, synthetic construct
  source 1..22: mol_type = other RNA
tctcccaaccccggcctggcgc

SEQ ID NO: 3890 - RNA, 22 nt, synthetic construct
  source 1..22: mol_type = other RNA
tctccgcctacaagctgtgtcg

SEQ ID NO: 3891 - RNA, 22 nt, synthetic construct
  source 1..22: mol_type = other RNA
tctctccgcctacaagctgtgt

SEQ ID NO: 3892 - RNA, 22 nt, synthetic construct
  source 1..22: mol_type = other RNA
tctgctccagcaggcgcgcggc

SEQ ID NO: 3893 - RNA, 22 nt, synthetic construct
  source 1..22: mol_type = other RNA
tctggcccaggcaccgccagcc

SEQ ID NO: 3894 - RNA, 22 nt, synthetic construct
  source 1..22: mol_type = other RNA
tctgtgcgacgccatccgcctc

SEQ ID NO: 3895 - RNA, 22 nt, synthetic construct
  source 1..22: mol_type = other RNA
tcttccaactggtggaggaggc

SEQ ID NO: 3896 - RNA, 22 nt, synthetic construct
  source 1..22: mol_type = other RNA
tcttcgccatgtcgggcccacg

SEQ ID NO: 3897 - RNA, 22 nt, synthetic construct
  source 1..22: mol_type = other RNA
tgaagcaggcgggcggcgcgcg

SEQ ID NO: 3898 - RNA, 22 nt, synthetic construct
  source 1..22: mol_type = other RNA
tgacgctgcttctctccgccta

SEQ ID NO: 3899 - RNA, 22 nt, synthetic construct
  source 1..22: mol_type = other RNA
tgagaaccggtgagcgcgccag

SEQ ID NO: 3900 - RNA, 22 nt, synthetic construct
  source 1..22: mol_type = other RNA
tgcacacgcgtctccaactccg

SEQ ID NO: 3901 - RNA, 22 nt, synthetic construct
  source 1..22: mol_type = other RNA
tgcacctcggtgcctgcccccg

SEQ ID NO: 3902 - RNA, 22 nt, synthetic construct
  source 1..22: mol_type = other RNA
tgcagcagccgcaacagcaggt

SEQ ID NO: 3903 - RNA, 22 nt, synthetic construct
  source 1..22: mol_type = other RNA
tgcagcaggccttgtccgcgct

SEQ ID NO: 3904 - RNA, 22 nt, synthetic construct
  source 1..22: mol_type = other RNA
tgcagctccggcagcgcgcgct

SEQ ID NO: 3905 - RNA, 22 nt, synthetic construct
  source 1..22: mol_type = other RNA
tgcaggacgccctggagcgcgc

SEQ ID NO: 3906 - RNA, 22 nt, synthetic construct
  source 1..22: mol_type = other RNA
tgcaggccgcgcgcctgctgga

SEQ ID NO: 3907 - RNA, 22 nt, synthetic construct
  source 1..22: mol_type = other RNA
tgcaggcgccggagttggagac

SEQ ID NO: 3908 - RNA, 22 nt, synthetic construct
  source 1..22: mol_type = other RNA
tgccaccgcccccatctggccc

SEQ ID NO: 3909 - RNA, 22 nt, synthetic construct
  source 1..22: mol_type = other RNA
tgcccccggcgacacttcgcgg

SEQ ID NO: 3910 - RNA, 22 nt, synthetic construct
  source 1..22: mol_type = other RNA
tgccggagctgcagcaggcctt

SEQ ID NO: 3911 - RNA, 22 nt, synthetic construct
  source 1..22: mol_type = other RNA
tgcctgcccccggcgacacttc

SEQ ID NO: 3912 - RNA, 22 nt, synthetic construct
  source 1..22: mol_type = other RNA
tgcctgggccagatgggggcgg

SEQ ID NO: 3913 - RNA, 22 nt, synthetic construct
  source 1..22: mol_type = other RNA
tgcgacgccatccgcctcgatg

SEQ ID NO: 3914 - RNA, 22 nt, synthetic construct
  source 1..22: mol_type = other RNA
tgcggctgctgcaggcgccgga

SEQ ID NO: 3915 - RNA, 22 nt, synthetic construct
  source 1..22: mol_type = other RNA
tgctccagcaggcgcgcggcct

SEQ ID NO: 3916 - RNA, 22 nt, synthetic construct
  source 1..22: mol_type = other RNA
tgctgcagctccggcagcgcgc

SEQ ID NO: 3917 - RNA, 22 nt, synthetic construct
  source 1..22: mol_type = other RNA
tgctgcaggcgccggagttgga

SEQ ID NO: 3918 - RNA, 22 nt, synthetic construct
  source 1..22: mol_type = other RNA
tgctggagcagatcctggtggc

SEQ ID NO: 3919 - RNA, 22 nt, synthetic construct
  source 1..22: mol_type = other RNA
tgctgttgcggctgctgcaggc

SEQ ID NO: 3920 - RNA, 22 nt, synthetic construct
  source 1..22: mol_type = other RNA
tgcttcagcgcggacaaggcct

SEQ ID NO: 3921 - RNA, 22 nt, synthetic construct
  source 1..22: mol_type = other RNA
tgcttctctccgcctacaagct

SEQ ID NO: 3922 - RNA, 22 nt, synthetic construct
  source 1..22: mol_type = other RNA
tggaagacctcggccaggccgg

SEQ ID NO: 3923 - RNA, 22 nt, synthetic construct
  source 1..22: mol_type = other RNA
tggagacgcgtgtgcaggccgc

SEQ ID NO: 3924 - RNA, 22 nt, synthetic construct
  source 1..22: mol_type = other RNA
tggagcagatcctggtggctga

SEQ ID NO: 3925 - RNA, 22 nt, synthetic construct
  source 1..22: mol_type = other RNA
tggagcgcgcgctgccggagct

SEQ ID NO: 3926 - RNA, 22 nt, synthetic construct
  source 1..22: mol_type = other RNA
tggcccaggcaccgccagccgc

SEQ ID NO: 3927 - RNA, 22 nt, synthetic construct
  source 1..22: mol_type = other RNA
tggccgaggtcttccaactggt

SEQ ID NO: 3928 - RNA, 22 nt, synthetic construct
  source 1..22: mol_type = other RNA
tggccgcgggccccgcgaagtg

SEQ ID NO: 3929 - RNA, 22 nt, synthetic construct
  source 1..22: mol_type = other RNA
tggcgaagaagcgacacagctt

SEQ ID NO: 3930 - RNA, 22 nt, synthetic construct
  source 1..22: mol_type = other RNA
tggcgcgctcaccggttctcag

SEQ ID NO: 3931 - RNA, 22 nt, synthetic construct
  source 1..22: mol_type = other RNA
tggcggcctcgacctgctgttg

SEQ ID NO: 3932 - RNA, 22 nt, synthetic construct
  source 1..22: mol_type = other RNA
tggcggtgcctgggccagatgg

SEQ ID NO: 3933 - RNA, 22 nt, synthetic construct
  source 1..22: mol_type = other RNA
tggcgtcgcacagaccctgggc

SEQ ID NO: 3934 - RNA, 22 nt, synthetic construct
  source 1..22: mol_type = other RNA
tggctgagaaccggtgagcgcg

SEQ ID NO: 3935 - RNA, 22 nt, synthetic construct
  source 1..22: mol_type = other RNA
tgggccagatgggggcggtggc

SEQ ID NO: 3936 - RNA, 22 nt, synthetic construct
  source 1..22: mol_type = other RNA
tgggcccgacatggcgaagaag

SEQ ID NO: 3937 - RNA, 22 nt, synthetic construct
  source 1..22: mol_type = other RNA
tgggcccgtgccaccgccccca

SEQ ID NO: 3938 - RNA, 22 nt, synthetic construct
  source 1..22: mol_type = other RNA
tgggccgcgaggtagcccaggg

SEQ ID NO: 3939 - RNA, 22 nt, synthetic construct
  source 1..22: mol_type = other RNA
tgggcgccggcctggccgaggt

SEQ ID NO: 3940 - RNA, 22 nt, synthetic construct
  source 1..22: mol_type = other RNA
tgggggcggtggcacgggccca

SEQ ID NO: 3941 - RNA, 22 nt, synthetic construct
  source 1..22: mol_type = other RNA
tggtcctgacgctgcttctctc

SEQ ID NO: 3942 - RNA, 22 nt, synthetic construct
  source 1..22: mol_type = other RNA
tggtggctgagaaccggtgagc

SEQ ID NO: 3943 - RNA, 22 nt, synthetic construct
  source 1..22: mol_type = other RNA
tgtaggcggagagaagcagcgt

SEQ ID NO: 3944 - RNA, 22 nt, synthetic construct
  source 1..22: mol_type = other RNA
tgtcccccgcggccccgcgccc

SEQ ID NO: 3945 - RNA, 22 nt, synthetic construct
  source 1..22: mol_type = other RNA
tgtccgcgctgaagcaggcggg

SEQ ID NO: 3946 - RNA, 22 nt, synthetic construct
  source 1..22: mol_type = other RNA
tgtcgccgggggcaggcaccga

SEQ ID NO: 3947 - RNA, 22 nt, synthetic construct
  source 1..22: mol_type = other RNA
tgtcgcttcttcgccatgtcgg

SEQ ID NO: 3948 - RNA, 22 nt, synthetic construct
  source 1..22: mol_type = other RNA
tgtcgggcccacggccgggcgc

SEQ ID NO: 3949 - RNA, 22 nt, synthetic construct
  source 1..22: mol_type = other RNA
tgtgcaggccgcgcgcctgctg

SEQ ID NO: 3950 - RNA, 22 nt, synthetic construct
  source 1..22: mol_type = other RNA
tgtgcgacgccatccgcctcga

SEQ ID NO: 3951 - RNA, 22 nt, synthetic construct
  source 1..22: mol_type = other RNA
tgtgtcgcttcttcgccatgtc

SEQ ID NO: 3952 - RNA, 22 nt, synthetic construct
  source 1..22: mol_type = other RNA
tgttgcggctgctgcaggcgcc

SEQ ID NO: 3953 - RNA, 22 nt, synthetic construct
  source 1..22: mol_type = other RNA
ttcagcgcggacaaggcctgct

SEQ ID NO: 3954 - RNA, 22 nt, synthetic construct
  source 1..22: mol_type = other RNA
ttccaactggtggaggaggcct

SEQ ID NO: 3955 - RNA, 22 nt, synthetic construct
  source 1..22: mol_type = other RNA
ttcgccatgtcgggcccacggc

SEQ ID NO: 3956 - RNA, 22 nt, synthetic construct
  source 1..22: mol_type = other RNA
ttctcagccaccaggatctgct

SEQ ID NO: 3957 - RNA, 22 nt, synthetic construct
  source 1..22: mol_type = other RNA
ttctctccgcctacaagctgtg

SEQ ID NO: 3958 - RNA, 22 nt, synthetic construct
  source 1..22: mol_type = other RNA
ttcttcgccatgtcgggcccac

SEQ ID NO: 3959 - RNA, 22 nt, synthetic construct
  source 1..22: mol_type = other RNA
ttgcggctgctgcaggcgccgg

SEQ ID NO: 3960 - RNA, 22 nt, synthetic construct
  source 1..22: mol_type = other RNA
ttggaagacctcggccaggccg

SEQ ID NO: 3961 - RNA, 22 nt, synthetic construct
  source 1..22: mol_type = other RNA
ttggagacgcgtgtgcaggccg

SEQ ID NO: 3962 - RNA, 22 nt, synthetic construct
  source 1..22: mol_type = other RNA
ttgtaggcggagagaagcagcg

SEQ ID NO: 3963 - RNA, 22 nt, synthetic construct
  source 1..22: mol_type = other RNA
ttgtccgcgctgaagcaggcgg

SEQ ID NO: 3964 - RNA, 20 nt, synthetic construct
  source 1..20: mol_type = other RNA
aaagccccgatgcactgcgc

SEQ ID NO: 3965 - RNA, 20 nt, synthetic construct
  source 1..20: mol_type = other RNA
aacaaggaggtggagcgcga

SEQ ID NO: 3966 - RNA, 20 nt, synthetic construct
  source 1..20: mol_type = other RNA
aacaccgctactgcgaggca

SEQ ID NO: 3967 - RNA, 20 nt, synthetic construct
  source 1..20: mol_type = other RNA
aacatgtgctccaagatgcc

SEQ ID NO: 3968 - RNA, 20 nt, synthetic construct
  source 1..20: mol_type = other RNA
aaccccacatctgcacccac

SEQ ID NO: 3969 - RNA, 20 nt, synthetic construct
  source 1..20: mol_type = other RNA
aacccgtagagctggcgcgg

SEQ ID NO: 3970 - RNA, 20 nt, synthetic construct
  source 1..20: mol_type = other RNA
aaccgcttggaggcgcagtg

SEQ ID NO: 3971 - RNA, 20 nt, synthetic construct
  source 1..20: mol_type = other RNA
aacctggcgaaggaacgcga

SEQ ID NO: 3972 - RNA, 20 nt, synthetic construct
  source 1..20: mol_type = other RNA
aacgcgaacccgtagagctg

SEQ ID NO: 3973 - RNA, 20 nt, synthetic construct
  source 1..20: mol_type = other RNA
aacggcacgaggcgctgcag

SEQ ID NO: 3974 - RNA, 20 nt, synthetic construct
  source 1..20: mol_type = other RNA
aactgcgcgctgcacggggg

SEQ ID NO: 3975 - RNA, 20 nt, synthetic construct
  source 1..20: mol_type = other RNA
aagaccaaggtgggtgcaga

SEQ ID NO: 3976 - RNA, 20 nt, synthetic construct
  source 1..20: mol_type = other RNA
aagagccactcggctgcgcg

SEQ ID NO: 3977 - RNA, 20 nt, synthetic construct
  source 1..20: mol_type = other RNA
aagagcctgcaaggcaagac

SEQ ID NO: 3978 - RNA, 20 nt, synthetic construct
  source 1..20: mol_type = other RNA
aagatgcctgccacgctccg

SEQ ID NO: 3979 - RNA, 20 nt, synthetic construct
  source 1..20: mol_type = other RNA
aagcagctcgtcctccttgg

SEQ ID NO: 3980 - RNA, 20 nt, synthetic construct
  source 1..20: mol_type = other RNA
aagcattcggaggagacatg

SEQ ID NO: 3981 - RNA, 20 nt, synthetic construct
  source 1..20: mol_type = other RNA
aagccagggccgcgggcccg

SEQ ID NO: 3982 - RNA, 20 nt, synthetic construct
  source 1..20: mol_type = other RNA
aagccccgatgcactgcgcc

SEQ ID NO: 3983 - RNA, 20 nt, synthetic construct
  source 1..20: mol_type = other RNA
aagcgcgcagccgagtggct

SEQ ID NO: 3984 - RNA, 20 nt, synthetic construct
  source 1..20: mol_type = other RNA
aagcggccagggtccagcga

SEQ ID NO: 3985 - RNA, 20 nt, synthetic construct
  source 1..20: mol_type = other RNA
aagcggctccacgagcgcca

SEQ ID NO: 3986 - RNA, 20 nt, synthetic construct
  source 1..20: mol_type = other RNA
aagcggttagagtcgagcaa

SEQ ID NO: 3987 - RNA, 20 nt, synthetic construct
  source 1..20: mol_type = other RNA
aaggaacgcgaacccgtaga

SEQ ID NO: 3988 - RNA, 20 nt, synthetic construct
  source 1..20: mol_type = other RNA
aaggaggacgagctgcttcg

SEQ ID NO: 3989 - RNA, 20 nt, synthetic construct
  source 1..20: mol_type = other RNA
aaggaggtggagcgcgaggt

SEQ ID NO: 3990 - RNA, 20 nt, synthetic construct
  source 1..20: mol_type = other RNA
aaggcaagaccaaggtgggt

SEQ ID NO: 3991 - RNA, 20 nt, synthetic construct
  source 1..20: mol_type = other RNA
aaggcgagcgggaagagcca

SEQ ID NO: 3992 - RNA, 20 nt, synthetic construct
  source 1..20: mol_type = other RNA
aaggtgggtgcagatgtggg

SEQ ID NO: 3993 - RNA, 20 nt, synthetic construct
  source 1..20: mol_type = other RNA
aatacagcaccgcgtccagg

SEQ ID NO: 3994 - RNA, 20 nt, synthetic construct
  source 1..20: mol_type = other RNA
aatgcttgaacatgtgctcc

SEQ ID NO: 3995 - RNA, 20 nt, synthetic construct
  source 1..20: mol_type = other RNA
acaagccagggccgcgggcc

SEQ ID NO: 3996 - RNA, 20 nt, synthetic construct
  source 1..20: mol_type = other RNA
acaagcggctccacgagcgc

SEQ ID NO: 3997 - RNA, 20 nt, synthetic construct
  source 1..20: mol_type = other RNA
acaaggaggtggagcgcgag

SEQ ID NO: 3998 - RNA, 20 nt, synthetic construct
  source 1..20: mol_type = other RNA
acacaagccagggccgcggg

SEQ ID NO: 3999 - RNA, 20 nt, synthetic construct
  source 1..20: mol_type = other RNA
acaccgctactgcgaggcag

SEQ ID NO: 4000 - RNA, 20 nt, synthetic construct
  source 1..20: mol_type = other RNA
acagcaccgcgtccaggccg

SEQ ID NO: 4001 - RNA, 20 nt, synthetic construct
  source 1..20: mol_type = other RNA
acagcgggcgaagcggccag

SEQ ID NO: 4002 - RNA, 20 nt, synthetic construct
  source 1..20: mol_type = other RNA
acatctgcacccaccttggt

SEQ ID NO: 4003 - RNA, 20 nt, synthetic construct
  source 1..20: mol_type = other RNA
acatgccagaggctggtggc

SEQ ID NO: 4004 - RNA, 20 nt, synthetic construct
  source 1..20: mol_type = other RNA
acatgtgctccaagatgcct

SEQ ID NO: 4005 - RNA, 20 nt, synthetic construct
  source 1..20: mol_type = other RNA
acatgttcaagcattcggag

SEQ ID NO: 4006 - RNA, 20 nt, synthetic construct
  source 1..20: mol_type = other RNA
accaaggtgggtgcagatgt

SEQ ID NO: 4007 - RNA, 20 nt, synthetic construct
  source 1..20: mol_type = other RNA
accaatacagcaccgcgtcc

SEQ ID NO: 4008 - RNA, 20 nt, synthetic construct
  source 1..20: mol_type = other RNA
accagacagcgggcgaagcg

SEQ ID NO: 4009 - RNA, 20 nt, synthetic construct
  source 1..20: mol_type = other RNA
accagcctctggcatgtctc

SEQ ID NO: 4010 - RNA, 20 nt, synthetic construct
  source 1..20: mol_type = other RNA
accatgcgtcgctgcaccgc

SEQ ID NO: 4011 - RNA, 20 nt, synthetic construct
  source 1..20: mol_type = other RNA
acccaaccccacatctgcac

SEQ ID NO: 4012 - RNA, 20 nt, synthetic construct
  source 1..20: mol_type = other RNA
acccaccttggtcttgcctt

SEQ ID NO: 4013 - RNA, 20 nt, synthetic construct
  source 1..20: mol_type = other RNA
accccacatctgcacccacc

SEQ ID NO: 4014 - RNA, 20 nt, synthetic construct
  source 1..20: mol_type = other RNA
accccgcgctgctgcgccac

SEQ ID NO: 4015 - RNA, 20 nt, synthetic construct
  source 1..20: mol_type = other RNA
acccgtagagctggcgcgga

SEQ ID NO: 4016 - RNA, 20 nt, synthetic construct
  source 1..20: mol_type = other RNA
accctggccgcttcgcccgc

SEQ ID NO: 4017 - RNA, 20 nt, synthetic construct
  source 1..20: mol_type = other RNA
accgcctggcccccgtgcag

SEQ ID NO: 4018 - RNA, 20 nt, synthetic construct
  source 1..20: mol_type = other RNA
accgcgtccaggccgccggc

SEQ ID NO: 4019 - RNA, 20 nt, synthetic construct
  source 1..20: mol_type = other RNA
accgcgtggcgcgcattggg

SEQ ID NO: 4020 - RNA, 20 nt, synthetic construct
  source 1..20: mol_type = other RNA
accgctactgcgaggcaggc

SEQ ID NO: 4021 - RNA, 20 nt, synthetic construct
  source 1..20: mol_type = other RNA
accgcttggaggcgcagtgc

SEQ ID NO: 4022 - RNA, 20 nt, synthetic construct
  source 1..20: mol_type = other RNA
acctccttgttagtcgccaa

SEQ ID NO: 4023 - RNA, 20 nt, synthetic construct
  source 1..20: mol_type = other RNA
acctcgcgctccacctcctt

SEQ ID NO: 4024 - RNA, 20 nt, synthetic construct
  source 1..20: mol_type = other RNA
acctctgcgccgaggctgcc

SEQ ID NO: 4025 - RNA, 20 nt, synthetic construct
  source 1..20: mol_type = other RNA
acctgcagcgcctcgtgccg

SEQ ID NO: 4026 - RNA, 20 nt, synthetic construct
  source 1..20: mol_type = other RNA
acctggcgaaggaacgcgaa

SEQ ID NO: 4027 - RNA, 20 nt, synthetic construct
  source 1..20: mol_type = other RNA
accttggtcttgccttgcag

SEQ ID NO: 4028 - RNA, 20 nt, synthetic construct
  source 1..20: mol_type = other RNA
acgacctgcagcgcctcgtg

SEQ ID NO: 4029 - RNA, 20 nt, synthetic construct
  source 1..20: mol_type = other RNA
acgagcgccagcgtgcccga

SEQ ID NO: 4030 - RNA, 20 nt, synthetic construct
  source 1..20: mol_type = other RNA
acgagctgcttcggctgcac

SEQ ID NO: 4031 - RNA, 20 nt, synthetic construct
  source 1..20: mol_type = other RNA
acgaggcgctgcaggtcgtc

SEQ ID NO: 4032 - RNA, 20 nt, synthetic construct
  source 1..20: mol_type = other RNA
acgcatggtagagaagcgcg

SEQ ID NO: 4033 - RNA, 20 nt, synthetic construct
  source 1..20: mol_type = other RNA
acgccagcgacacaagccag

SEQ ID NO: 4034 - RNA, 20 nt, synthetic construct
  source 1..20: mol_type = other RNA
acgcccagcccaatgcgcgc

SEQ ID NO: 4035 - RNA, 20 nt, synthetic construct
  source 1..20: mol_type = other RNA
acgcctgcctcgcagtagcg

SEQ ID NO: 4036 - RNA, 20 nt, synthetic construct
  source 1..20: mol_type = other RNA
acgcgaacccgtagagctgg

SEQ ID NO: 4037 - RNA, 20 nt, synthetic construct
  source 1..20: mol_type = other RNA
acgcggtgctgtattggtgc

SEQ ID NO: 4038 - RNA, 20 nt, synthetic construct
  source 1..20: mol_type = other RNA
acgctccgcgccagctctac

SEQ ID NO: 4039 - RNA, 20 nt, synthetic construct
  source 1..20: mol_type = other RNA
acgctggcgctcgtggagcc

SEQ ID NO: 4040 - RNA, 20 nt, synthetic construct
  source 1..20: mol_type = other RNA
acggaccccgcgctgctgcg

SEQ ID NO: 4041 - RNA, 20 nt, synthetic construct
  source 1..20: mol_type = other RNA
acggcacgaggcgctgcagg

SEQ ID NO: 4042 - RNA, 20 nt, synthetic construct
  source 1..20: mol_type = other RNA
acgggggccaggcggtgcag

SEQ ID NO: 4043 - RNA, 20 nt, synthetic construct
  source 1..20: mol_type = other RNA
acgggttcgcgttccttcgc

SEQ ID NO: 4044 - RNA, 20 nt, synthetic construct
  source 1..20: mol_type = other RNA
actaacaaggaggtggagcg

SEQ ID NO: 4045 - RNA, 20 nt, synthetic construct
  source 1..20: mol_type = other RNA
actcggctgcgcgcttctct

SEQ ID NO: 4046 - RNA, 20 nt, synthetic construct
  source 1..20: mol_type = other RNA
actctaaccgcttggaggcg

SEQ ID NO: 4047 - RNA, 20 nt, synthetic construct
  source 1..20: mol_type = other RNA
actgcgaggcaggcgtgcag

SEQ ID NO: 4048 - RNA, 20 nt, synthetic construct
  source 1..20: mol_type = other RNA
actgcgcctccaagcggtta

SEQ ID NO: 4049 - RNA, 20 nt, synthetic construct
  source 1..20: mol_type = other RNA
actgcgcgctgcacgggggc

SEQ ID NO: 4050 - RNA, 20 nt, synthetic construct
  source 1..20: mol_type = other RNA
actgcgcgctggcgctgggc

SEQ ID NO: 4051 - RNA, 20 nt, synthetic construct
  source 1..20: mol_type = other RNA
agaaagccccgatgcactgc

SEQ ID NO: 4052 - RNA, 20 nt, synthetic construct
  source 1..20: mol_type = other RNA
agaagcgcgcagccgagtgg

SEQ ID NO: 4053 - RNA, 20 nt, synthetic construct
  source 1..20: mol_type = other RNA
agaaggcgagcgggaagagc

SEQ ID NO: 4054 - RNA, 20 nt, synthetic construct
  source 1..20: mol_type = other RNA
agacagcgggcgaagcggcc

SEQ ID NO: 4055 - RNA, 20 nt, synthetic construct
  source 1..20: mol_type = other RNA
agacatgccagaggctggtg

SEQ ID NO: 4056 - RNA, 20 nt, synthetic construct
  source 1..20: mol_type = other RNA
agaccaaggtgggtgcagat

SEQ ID NO: 4057 - RNA, 20 nt, synthetic construct
  source 1..20: mol_type = other RNA
agaccgcgtggcgcgcattg

SEQ ID NO: 4058 - RNA, 20 nt, synthetic construct
  source 1..20: mol_type = other RNA
agagaagcgcgcagccgagt

SEQ ID NO: 4059 - RNA, 20 nt, synthetic construct
  source 1..20: mol_type = other RNA
agagccactcggctgcgcgc

SEQ ID NO: 4060 - RNA, 20 nt, synthetic construct
  source 1..20: mol_type = other RNA
agagcctgcaaggcaagacc

SEQ ID NO: 4061 - RNA, 20 nt, synthetic construct
  source 1..20: mol_type = other RNA
agagctggcgcggagcgtgg

SEQ ID NO: 4062 - RNA, 20 nt, synthetic construct
  source 1..20: mol_type = other RNA
agaggctggtggcggccggc

SEQ ID NO: 4063 - RNA, 20 nt, synthetic construct
  source 1..20: mol_type = other RNA
agaggtagaaagccccgatg

SEQ ID NO: 4064 - RNA, 20 nt, synthetic construct
  source 1..20: mol_type = other RNA
agagtcgagcaacggcacga

SEQ ID NO: 4065 - RNA, 20 nt, synthetic construct
  source 1..20: mol_type = other RNA
agatgcctgccacgctccgc

SEQ ID NO: 4066 - RNA, 20 nt, synthetic construct
  source 1..20: mol_type = other RNA
agcaacggcacgaggcgctg

SEQ ID NO: 4067 - RNA, 20 nt, synthetic construct
  source 1..20: mol_type = other RNA
agcacatgttcaagcattcg

SEQ ID NO: 4068 - RNA, 20 nt, synthetic construct
  source 1..20: mol_type = other RNA
agcaccgcgtccaggccgcc

SEQ ID NO: 4069 - RNA, 20 nt, synthetic construct
  source 1..20: mol_type = other RNA
agcagcgcggggtccgtgcg

SEQ ID NO: 4070 - RNA, 20 nt, synthetic construct
  source 1..20: mol_type = other RNA
agcagctcgtcctccttgga

SEQ ID NO: 4071 - RNA, 20 nt, synthetic construct
  source 1..20: mol_type = other RNA
agcattcggaggagacatgc

SEQ ID NO: 4072 - RNA, 20 nt, synthetic construct
  source 1..20: mol_type = other RNA
agccactcggctgcgcgctt

SEQ ID NO: 4073 - RNA, 20 nt, synthetic construct
  source 1..20: mol_type = other RNA
agccagggccgcgggcccga

SEQ ID NO: 4074 - RNA, 20 nt, synthetic construct
  source 1..20: mol_type = other RNA
agccccgatgcactgcgcct

SEQ ID NO: 4075 - RNA, 20 nt, synthetic construct
  source 1..20: mol_type = other RNA
agccgaagcagctcgtcctc

SEQ ID NO: 4076 - RNA, 20 nt, synthetic construct
  source 1..20: mol_type = other RNA
agccgagtggctcttcccgc

SEQ ID NO: 4077 - RNA, 20 nt, synthetic construct
  source 1..20: mol_type = other RNA
agccgcttgtggcctcgctg

SEQ ID NO: 4078 - RNA, 20 nt, synthetic construct
  source 1..20: mol_type = other RNA
agcctcggcgcagaggtaga

SEQ ID NO: 4079 - RNA, 20 nt, synthetic construct
  source 1..20: mol_type = other RNA
agcctctggcatgtctcctc

SEQ ID NO: 4080 - RNA, 20 nt, synthetic construct
  source 1..20: mol_type = other RNA
agcctgcaaggcaagaccaa

SEQ ID NO: 4081 - RNA, 20 nt, synthetic construct
  source 1..20: mol_type = other RNA
agcgacacaagccagggccg

SEQ ID NO: 4082 - RNA, 20 nt, synthetic construct
  source 1..20: mol_type = other RNA
agcgacgcatggtagagaag

SEQ ID NO: 4083 - RNA, 20 nt, synthetic construct
  source 1..20: mol_type = other RNA
agcgaggccacaagcggctc

SEQ ID NO: 4084 - RNA, 20 nt, synthetic construct
  source 1..20: mol_type = other RNA
agcgccagcgcgcagtggcg

SEQ ID NO: 4085 - RNA, 20 nt, synthetic construct
  source 1..20: mol_type = other RNA
agcgccagcgtgcccgagcg

SEQ ID NO: 4086 - RNA, 20 nt, synthetic construct
  source 1..20: mol_type = other RNA
agcgcctcgtgccgttgctc

SEQ ID NO: 4087 - RNA, 20 nt, synthetic construct
  source 1..20: mol_type = other RNA
agcgcgaggtggagcgctcg

SEQ ID NO: 4088 - RNA, 20 nt, synthetic construct
  source 1..20: mol_type = other RNA
agcgcgcagccgagtggctc

SEQ ID NO: 4089 - RNA, 20 nt, synthetic construct
  source 1..20: mol_type = other RNA
agcgcgcagtggcgcagcag

SEQ ID NO: 4090 - RNA, 20 nt, synthetic construct
  source 1..20: mol_type = other RNA
agcgcgcagttgcccagcgc

SEQ ID NO: 4091 - RNA, 20 nt, synthetic construct
  source 1..20: mol_type = other RNA
agcgcggggtccgtgcggcg

SEQ ID NO: 4092 - RNA, 20 nt, synthetic construct
  source 1..20: mol_type = other RNA
agcgctccacctcgcgctcc

SEQ ID NO: 4093 - RNA, 20 nt, synthetic construct
  source 1..20: mol_type = other RNA
agcgctcgggcacgctggcg

SEQ ID NO: 4094 - RNA, 20 nt, synthetic construct
  source 1..20: mol_type = other RNA
agcggccagggtccagcgag

SEQ ID NO: 4095 - RNA, 20 nt, synthetic construct
  source 1..20: mol_type = other RNA
agcggctccacgagcgccag

SEQ ID NO: 4096 - RNA, 20 nt, synthetic construct
  source 1..20: mol_type = other RNA
agcgggaagagccactcggc

SEQ ID NO: 4097 - RNA, 20 nt, synthetic construct
  source 1..20: mol_type = other RNA
agcgggcgaagcggccaggg

SEQ ID NO: 4098 - RNA, 20 nt, synthetic construct
  source 1..20: mol_type = other RNA
agcggtgttggcgactaaca

SEQ ID NO: 4099 - RNA, 20 nt, synthetic construct
  source 1..20: mol_type = other RNA
agcggttagagtcgagcaac

SEQ ID NO: 4100 - RNA, 20 nt, synthetic construct
  source 1..20: mol_type = other RNA
agcgtgcccgagcgctccac

SEQ ID NO: 4101 - RNA, 20 nt, synthetic construct
  source 1..20: mol_type = other RNA
agcgtggcaggcatcttgga

SEQ ID NO: 4102 - RNA, 20 nt, synthetic construct
  source 1..20: mol_type = other RNA
agctcgtcctccttggagaa

SEQ ID NO: 4103 - RNA, 20 nt, synthetic construct
  source 1..20: mol_type = other RNA
agctctacgggttcgcgttc

SEQ ID NO: 4104 - RNA, 20 nt, synthetic construct
  source 1..20: mol_type = other RNA
agctgcttcggctgcacgcc

SEQ ID NO: 4105 - RNA, 20 nt, synthetic construct
  source 1..20: mol_type = other RNA
agctggcgcggagcgtggca

SEQ ID NO: 4106 - RNA, 20 nt, synthetic construct
  source 1..20: mol_type = other RNA
aggaacgcgaacccgtagag

SEQ ID NO: 4107 - RNA, 20 nt, synthetic construct
  source 1..20: mol_type = other RNA
aggacgagctgcttcggctg

SEQ ID NO: 4108 - RNA, 20 nt, synthetic construct
  source 1..20: mol_type = other RNA
aggagacatgccagaggctg

SEQ ID NO: 4109 - RNA, 20 nt, synthetic construct
  source 1..20: mol_type = other RNA
aggaggacgagctgcttcgg

SEQ ID NO: 4110 - RNA, 20 nt, synthetic construct
  source 1..20: mol_type = other RNA
aggaggtggagcgcgaggtg

SEQ ID NO: 4111 - RNA, 20 nt, synthetic construct
  source 1..20: mol_type = other RNA
aggatcacgcccagcccaat

SEQ ID NO: 4112 - RNA, 20 nt, synthetic construct
  source 1..20: mol_type = other RNA
aggcaagaccaaggtgggtg

SEQ ID NO: 4113 - RNA, 20 nt, synthetic construct
  source 1..20: mol_type = other RNA
aggcaggcgtgcagccgaag

SEQ ID NO: 4114 - RNA, 20 nt, synthetic construct
  source 1..20: mol_type = other RNA
aggcatcttggagcacatgt

SEQ ID NO: 4115 - RNA, 20 nt, synthetic construct
  source 1..20: mol_type = other RNA
aggccacaagcggctccacg

SEQ ID NO: 4116 - RNA, 20 nt, synthetic construct
  source 1..20: mol_type = other RNA
aggccgccggccgccaccag

SEQ ID NO: 4117 - RNA, 20 nt, synthetic construct
  source 1..20: mol_type = other RNA
aggcgagcgggaagagccac

SEQ ID NO: 4118 - RNA, 20 nt, synthetic construct
  source 1..20: mol_type = other RNA
aggcgcagtgcatcggggct

SEQ ID NO: 4119 - RNA, 20 nt, synthetic construct
  source 1..20: mol_type = other RNA
aggcgctgcaggtcgtcggg

SEQ ID NO: 4120 - RNA, 20 nt, synthetic construct
  source 1..20: mol_type = other RNA
aggcggtgcagcgacgcatg

SEQ ID NO: 4121 - RNA, 20 nt, synthetic construct
  source 1..20: mol_type = other RNA
aggcgtgcagccgaagcagc

SEQ ID NO: 4122 - RNA, 20 nt, synthetic construct
  source 1..20: mol_type = other RNA
aggctcttgatggcagcctc

SEQ ID NO: 4123 - RNA, 20 nt, synthetic construct
  source 1..20: mol_type = other RNA
aggctgccatcaagagcctg

SEQ ID NO: 4124 - RNA, 20 nt, synthetic construct
  source 1..20: mol_type = other RNA
aggctggtggcggccggcgg

SEQ ID NO: 4125 - RNA, 20 nt, synthetic construct
  source 1..20: mol_type = other RNA
agggccgcgggcccgacgac

SEQ ID NO: 4126 - RNA, 20 nt, synthetic construct
  source 1..20: mol_type = other RNA
agggtccagcgaggccacaa

SEQ ID NO: 4127 - RNA, 20 nt, synthetic construct
  source 1..20: mol_type = other RNA
aggtagaaagccccgatgca

SEQ ID NO: 4128 - RNA, 20 nt, synthetic construct
  source 1..20: mol_type = other RNA
aggtcgtcgggcccgcggcc

SEQ ID NO: 4129 - RNA, 20 nt, synthetic construct
  source 1..20: mol_type = other RNA
aggtggagcgcgaggtggag

SEQ ID NO: 4130 - RNA, 20 nt, synthetic construct
  source 1..20: mol_type = other RNA
aggtggagcgctcgggcacg

SEQ ID NO: 4131 - RNA, 20 nt, synthetic construct
  source 1..20: mol_type = other RNA
aggtgggtgcagatgtgggg

SEQ ID NO: 4132 - RNA, 20 nt, synthetic construct
  source 1..20: mol_type = other RNA
aggttcaggatcacgcccag

SEQ ID NO: 4133 - RNA, 20 nt, synthetic construct
  source 1..20: mol_type = other RNA
agtagcggtgttggcgacta

SEQ ID NO: 4134 - RNA, 20 nt, synthetic construct
  source 1..20: mol_type = other RNA
agtcgagcaacggcacgagg

SEQ ID NO: 4135 - RNA, 20 nt, synthetic construct
  source 1..20: mol_type = other RNA
agtcgccaacaccgctactg

SEQ ID NO: 4136 - RNA, 20 nt, synthetic construct
  source 1..20: mol_type = other RNA
agtgcatcggggctttctac

SEQ ID NO: 4137 - RNA, 20 nt, synthetic construct
  source 1..20: mol_type = other RNA
agtggcgcagcagcgcgggg

SEQ ID NO: 4138 - RNA, 20 nt, synthetic construct
  source 1..20: mol_type = other RNA
agtggctcttcccgctcgcc

SEQ ID NO: 4139 - RNA, 20 nt, synthetic construct
  source 1..20: mol_type = other RNA
agttgcccagcgccagcgcg

SEQ ID NO: 4140 - RNA, 20 nt, synthetic construct
  source 1..20: mol_type = other RNA
atacagcaccgcgtccaggc

SEQ ID NO: 4141 - RNA, 20 nt, synthetic construct
  source 1..20: mol_type = other RNA
atcaagagcctgcaaggcaa

SEQ ID NO: 4142 - RNA, 20 nt, synthetic construct
  source 1..20: mol_type = other RNA
atcacgcccagcccaatgcg

SEQ ID NO: 4143 - RNA, 20 nt, synthetic construct
  source 1..20: mol_type = other RNA
atccacccaaccccacatct

SEQ ID NO: 4144 - RNA, 20 nt, synthetic construct
  source 1..20: mol_type = other RNA
atcctgaacctggcgaagga

SEQ ID NO: 4145 - RNA, 20 nt, synthetic construct
  source 1..20: mol_type = other RNA
atcggggctttctacctctg

SEQ ID NO: 4146 - RNA, 20 nt, synthetic construct
  source 1..20: mol_type = other RNA
atctgcacccaccttggtct

SEQ ID NO: 4147 - RNA, 20 nt, synthetic construct
  source 1..20: mol_type = other RNA
atcttggagcacatgttcaa

SEQ ID NO: 4148 - RNA, 20 nt, synthetic construct
  source 1..20: mol_type = other RNA
atgcactgcgcctccaagcg

SEQ ID NO: 4149 - RNA, 20 nt, synthetic construct
  source 1..20: mol_type = other RNA
atgccagaggctggtggcgg

SEQ ID NO: 4150 - RNA, 20 nt, synthetic construct
  source 1..20: mol_type = other RNA
atgcctgccacgctccgcgc

SEQ ID NO: 4151 - RNA, 20 nt, synthetic construct
  source 1..20: mol_type = other RNA
atgcgtcgctgcaccgcctg

SEQ ID NO: 4152 - RNA, 20 nt, synthetic construct
  source 1..20: mol_type = other RNA
atgcttgaacatgtgctcca

SEQ ID NO: 4153 - RNA, 20 nt, synthetic construct
  source 1..20: mol_type = other RNA
atggcagcctcggcgcagag

SEQ ID NO: 4154 - RNA, 20 nt, synthetic construct
  source 1..20: mol_type = other RNA
atggtagagaagcgcgcagc

SEQ ID NO: 4155 - RNA, 20 nt, synthetic construct
  source 1..20: mol_type = other RNA
atgtctcctccgaatgcttg

SEQ ID NO: 4156 - RNA, 20 nt, synthetic construct
  source 1..20: mol_type = other RNA
atgtgctccaagatgcctgc

SEQ ID NO: 4157 - RNA, 20 nt, synthetic construct
  source 1..20: mol_type = other RNA
atgttcaagcattcggagga

SEQ ID NO: 4158 - RNA, 20 nt, synthetic construct
  source 1..20: mol_type = other RNA
attcggaggagacatgccag

SEQ ID NO: 4159 - RNA, 20 nt, synthetic construct
  source 1..20: mol_type = other RNA
attgggctgggcgtgatcct

SEQ ID NO: 4160 - RNA, 20 nt, synthetic construct
  source 1..20: mol_type = other RNA
attggtgccgccgcacggac

SEQ ID NO: 4161 - RNA, 20 nt, synthetic construct
  source 1..20: mol_type = other RNA
caacaccgctactgcgaggc

SEQ ID NO: 4162 - RNA, 20 nt, synthetic construct
  source 1..20: mol_type = other RNA
caaccccacatctgcaccca

SEQ ID NO: 4163 - RNA, 20 nt, synthetic construct
  source 1..20: mol_type = other RNA
caacggcacgaggcgctgca

SEQ ID NO: 4164 - RNA, 20 nt, synthetic construct
  source 1..20: mol_type = other RNA
caactgcgcgctgcacgggg

SEQ ID NO: 4165 - RNA, 20 nt, synthetic construct
  source 1..20: mol_type = other RNA
caagaccaaggtgggtgcag

SEQ ID NO: 4166 - RNA, 20 nt, synthetic construct
  source 1..20: mol_type = other RNA
caagagcctgcaaggcaaga

SEQ ID NO: 4167 - RNA, 20 nt, synthetic construct
  source 1..20: mol_type = other RNA
caagatgcctgccacgctcc

SEQ ID NO: 4168 - RNA, 20 nt, synthetic construct
  source 1..20: mol_type = other RNA
caagcattcggaggagacat

SEQ ID NO: 4169 - RNA, 20 nt, synthetic construct
  source 1..20: mol_type = other RNA
caagccagggccgcgggccc

SEQ ID NO: 4170 - RNA, 20 nt, synthetic construct
  source 1..20: mol_type = other RNA
caagcggctccacgagcgcc

SEQ ID NO: 4171 - RNA, 20 nt, synthetic construct
  source 1..20: mol_type = other RNA
caagcggttagagtcgagca

SEQ ID NO: 4172 - RNA, 20 nt, synthetic construct
  source 1..20: mol_type = other RNA
caaggaggacgagctgcttc

SEQ ID NO: 4173 - RNA, 20 nt, synthetic construct
  source 1..20: mol_type = other RNA
caaggaggtggagcgcgagg

SEQ ID NO: 4174 - RNA, 20 nt, synthetic construct
  source 1..20: mol_type = other RNA
caaggcaagaccaaggtggg

SEQ ID NO: 4175 - RNA, 20 nt, synthetic construct
  source 1..20: mol_type = other RNA
caaggtgggtgcagatgtgg

SEQ ID NO: 4176 - RNA, 20 nt, synthetic construct
  source 1..20: mol_type = other RNA
caatacagcaccgcgtccag

SEQ ID NO: 4177 - RNA, 20 nt, synthetic construct
  source 1..20: mol_type = other RNA
cacaagccagggccgcgggc

SEQ ID NO: 4178 - RNA, 20 nt, synthetic construct
  source 1..20: mol_type = other RNA
cacaagcggctccacgagcg

SEQ ID NO: 4179 - RNA, 20 nt, synthetic construct
  source 1..20: mol_type = other RNA
cacatctgcacccaccttgg

SEQ ID NO: 4180 - RNA, 20 nt, synthetic construct
  source 1..20: mol_type = other RNA
cacatgttcaagcattcgga

SEQ ID NO: 4181 - RNA, 20 nt, synthetic construct
  source 1..20: mol_type = other RNA
caccaatacagcaccgcgtc

SEQ ID NO: 4182 - RNA, 20 nt, synthetic construct
  source 1..20: mol_type = other RNA
caccagacagcgggcgaagc

SEQ ID NO: 4183 - RNA, 20 nt, synthetic construct
  source 1..20: mol_type = other RNA
caccagcctctggcatgtct

SEQ ID NO: 4184 - RNA, 20 nt, synthetic construct
  source 1..20: mol_type = other RNA
cacccaaccccacatctgca

SEQ ID NO: 4185 - RNA, 20 nt, synthetic construct
  source 1..20: mol_type = other RNA
cacccaccttggtcttgcct

SEQ ID NO: 4186 - RNA, 20 nt, synthetic construct
  source 1..20: mol_type = other RNA
caccgcctggcccccgtgca

SEQ ID NO: 4187 - RNA, 20 nt, synthetic construct
  source 1..20: mol_type = other RNA
caccgcgtccaggccgccgg

SEQ ID NO: 4188 - RNA, 20 nt, synthetic construct
  source 1..20: mol_type = other RNA
caccgctactgcgaggcagg

SEQ ID NO: 4189 - RNA, 20 nt, synthetic construct
  source 1..20: mol_type = other RNA
cacctccttgttagtcgcca

SEQ ID NO: 4190 - RNA, 20 nt, synthetic construct
  source 1..20: mol_type = other RNA
cacctcgcgctccacctcct

SEQ ID NO: 4191 - RNA, 20 nt, synthetic construct
  source 1..20: mol_type = other RNA
caccttggtcttgccttgca

SEQ ID NO: 4192 - RNA, 20 nt, synthetic construct
  source 1..20: mol_type = other RNA
cacgagcgccagcgtgcccg

SEQ ID NO: 4193 - RNA, 20 nt, synthetic construct
  source 1..20: mol_type = other RNA
cacgaggcgctgcaggtcgt

SEQ ID NO: 4194 - RNA, 20 nt, synthetic construct
  source 1..20: mol_type = other RNA
cacgcccagcccaatgcgcg

SEQ ID NO: 4195 - RNA, 20 nt, synthetic construct
  source 1..20: mol_type = other RNA
cacgcctgcctcgcagtagc

SEQ ID NO: 4196 - RNA, 20 nt, synthetic construct
  source 1..20: mol_type = other RNA
cacgctccgcgccagctcta

SEQ ID NO: 4197 - RNA, 20 nt, synthetic construct
  source 1..20: mol_type = other RNA
cacgctggcgctcgtggagc

SEQ ID NO: 4198 - RNA, 20 nt, synthetic construct
  source 1..20: mol_type = other RNA
cacggaccccgcgctgctgc

SEQ ID NO: 4199 - RNA, 20 nt, synthetic construct
  source 1..20: mol_type = other RNA
cacgggggccaggcggtgca

SEQ ID NO: 4200 - RNA, 20 nt, synthetic construct
  source 1..20: mol_type = other RNA
cactcggctgcgcgcttctc

SEQ ID NO: 4201 - RNA, 20 nt, synthetic construct
  source 1..20: mol_type = other RNA
cactgcgcctccaagcggtt

SEQ ID NO: 4202 - RNA, 20 nt, synthetic construct
  source 1..20: mol_type = other RNA
cactgcgcgctggcgctggg

SEQ ID NO: 4203 - RNA, 20 nt, synthetic construct
  source 1..20: mol_type = other RNA
cagacagcgggcgaagcggc

SEQ ID NO: 4204 - RNA, 20 nt, synthetic construct
  source 1..20: mol_type = other RNA
cagaggctggtggcggccgg

SEQ ID NO: 4205 - RNA, 20 nt, synthetic construct
  source 1..20: mol_type = other RNA
cagaggtagaaagccccgat

SEQ ID NO: 4206 - RNA, 20 nt, synthetic construct
  source 1..20: mol_type = other RNA
cagcaccgcgtccaggccgc

SEQ ID NO: 4207 - RNA, 20 nt, synthetic construct
  source 1..20: mol_type = other RNA
cagcagcgcggggtccgtgc

SEQ ID NO: 4208 - RNA, 20 nt, synthetic construct
  source 1..20: mol_type = other RNA
cagccgaagcagctcgtcct

SEQ ID NO: 4209 - RNA, 20 nt, synthetic construct
  source 1..20: mol_type = other RNA
cagccgagtggctcttcccg

SEQ ID NO: 4210 - RNA, 20 nt, synthetic construct
  source 1..20: mol_type = other RNA
cagcctcggcgcagaggtag

SEQ ID NO: 4211 - RNA, 20 nt, synthetic construct
  source 1..20: mol_type = other RNA
cagcctctggcatgtctcct

SEQ ID NO: 4212 - RNA, 20 nt, synthetic construct
  source 1..20: mol_type = other RNA
cagcgacacaagccagggcc

SEQ ID NO: 4213 - RNA, 20 nt, synthetic construct
  source 1..20: mol_type = other RNA
cagcgacgcatggtagagaa

SEQ ID NO: 4214 - RNA, 20 nt, synthetic construct
  source 1..20: mol_type = other RNA
cagcgaggccacaagcggct

SEQ ID NO: 4215 - RNA, 20 nt, synthetic construct
  source 1..20: mol_type = other RNA
cagcgccagcgcgcagtggc

SEQ ID NO: 4216 - RNA, 20 nt, synthetic construct
  source 1..20: mol_type = other RNA
cagcgcctcgtgccgttgct

SEQ ID NO: 4217 - RNA, 20 nt, synthetic construct
  source 1..20: mol_type = other RNA
cagcgcgcagtggcgcagca

SEQ ID NO: 4218 - RNA, 20 nt, synthetic construct
  source 1..20: mol_type = other RNA
cagcgcgcagttgcccagcg

SEQ ID NO: 4219 - RNA, 20 nt, synthetic construct
  source 1..20: mol_type = other RNA
cagcgcggggtccgtgcggc

SEQ ID NO: 4220 - RNA, 20 nt, synthetic construct
  source 1..20: mol_type = other RNA
cagcgggcgaagcggccagg

SEQ ID NO: 4221 - RNA, 20 nt, synthetic construct
  source 1..20: mol_type = other RNA
cagcgtgcccgagcgctcca

SEQ ID NO: 4222 - RNA, 20 nt, synthetic construct
  source 1..20: mol_type = other RNA
cagctcgtcctccttggaga

SEQ ID NO: 4223 - RNA, 20 nt, synthetic construct
  source 1..20: mol_type = other RNA
cagctctacgggttcgcgtt

SEQ ID NO: 4224 - RNA, 20 nt, synthetic construct
  source 1..20: mol_type = other RNA
caggatcacgcccagcccaa

SEQ ID NO: 4225 - RNA, 20 nt, synthetic construct
  source 1..20: mol_type = other RNA
caggcatcttggagcacatg

SEQ ID NO: 4226 - RNA, 20 nt, synthetic construct
  source 1..20: mol_type = other RNA
caggccgccggccgccacca

SEQ ID NO: 4227 - RNA, 20 nt, synthetic construct
  source 1..20: mol_type = other RNA
caggcggtgcagcgacgcat

SEQ ID NO: 4228 - RNA, 20 nt, synthetic construct
  source 1..20: mol_type = other RNA
caggcgtgcagccgaagcag

SEQ ID NO: 4229 - RNA, 20 nt, synthetic construct
  source 1..20: mol_type = other RNA
caggctcttgatggcagcct

SEQ ID NO: 4230 - RNA, 20 nt, synthetic construct
  source 1..20: mol_type = other RNA
cagggccgcgggcccgacga

SEQ ID NO: 4231 - RNA, 20 nt, synthetic construct
  source 1..20: mol_type = other RNA
cagggtccagcgaggccaca

SEQ ID NO: 4232 - RNA, 20 nt, synthetic construct
  source 1..20: mol_type = other RNA
caggtcgtcgggcccgcggc

SEQ ID NO: 4233 - RNA, 20 nt, synthetic construct
  source 1..20: mol_type = other RNA
caggttcaggatcacgccca

SEQ ID NO: 4234 - RNA, 20 nt, synthetic construct
  source 1..20: mol_type = other RNA
cagtagcggtgttggcgact

SEQ ID NO: 4235 - RNA, 20 nt, synthetic construct
  source 1..20: mol_type = other RNA
cagtgcatcggggctttcta

SEQ ID NO: 4236 - RNA, 20 nt, synthetic construct
  source 1..20: mol_type = other RNA
cagtggcgcagcagcgcggg

SEQ ID NO: 4237 - RNA, 20 nt, synthetic construct
  source 1..20: mol_type = other RNA
cagttgcccagcgccagcgc

SEQ ID NO: 4238 - RNA, 20 nt, synthetic construct
  source 1..20: mol_type = other RNA
catcaagagcctgcaaggca

SEQ ID NO: 4239 - RNA, 20 nt, synthetic construct
  source 1..20: mol_type = other RNA
catcggggctttctacctct

SEQ ID NO: 4240 - RNA, 20 nt, synthetic construct
  source 1..20: mol_type = other RNA
catctgcacccaccttggtc

SEQ ID NO: 4241 - RNA, 20 nt, synthetic construct
  source 1..20: mol_type = other RNA
catcttggagcacatgttca

SEQ ID NO: 4242 - RNA, 20 nt, synthetic construct
  source 1..20: mol_type = other RNA
catgccagaggctggtggcg

SEQ ID NO: 4243 - RNA, 20 nt, synthetic construct
  source 1..20: mol_type = other RNA
catgcgtcgctgcaccgcct

SEQ ID NO: 4244 - RNA, 20 nt, synthetic construct
  source 1..20: mol_type = other RNA
catggtagagaagcgcgcag

SEQ ID NO: 4245 - RNA, 20 nt, synthetic construct
  source 1..20: mol_type = other RNA
catgtctcctccgaatgctt

SEQ ID NO: 4246 - RNA, 20 nt, synthetic construct
  source 1..20: mol_type = other RNA
catgtgctccaagatgcctg

SEQ ID NO: 4247 - RNA, 20 nt, synthetic construct
  source 1..20: mol_type = other RNA
catgttcaagcattcggagg

SEQ ID NO: 4248 - RNA, 20 nt, synthetic construct
  source 1..20: mol_type = other RNA
cattcggaggagacatgcca

SEQ ID NO: 4249 - RNA, 20 nt, synthetic construct
  source 1..20: mol_type = other RNA
cattgggctgggcgtgatcc

SEQ ID NO: 4250 - RNA, 20 nt, synthetic construct
  source 1..20: mol_type = other RNA
ccaacaccgctactgcgagg

SEQ ID NO: 4251 - RNA, 20 nt, synthetic construct
  source 1..20: mol_type = other RNA
ccaaccccacatctgcaccc

SEQ ID NO: 4252 - RNA, 20 nt, synthetic construct
  source 1..20: mol_type = other RNA
ccaagatgcctgccacgctc

SEQ ID NO: 4253 - RNA, 20 nt, synthetic construct
  source 1..20: mol_type = other RNA
ccaagcggttagagtcgagc

SEQ ID NO: 4254 - RNA, 20 nt, synthetic construct
  source 1..20: mol_type = other RNA
ccaaggaggacgagctgctt

SEQ ID NO: 4255 - RNA, 20 nt, synthetic construct
  source 1..20: mol_type = other RNA
ccaaggtgggtgcagatgtg

SEQ ID NO: 4256 - RNA, 20 nt, synthetic construct
  source 1..20: mol_type = other RNA
ccaatacagcaccgcgtcca

SEQ ID NO: 4257 - RNA, 20 nt, synthetic construct
  source 1..20: mol_type = other RNA
ccacaagcggctccacgagc

SEQ ID NO: 4258 - RNA, 20 nt, synthetic construct
  source 1..20: mol_type = other RNA
ccacatctgcacccaccttg

SEQ ID NO: 4259 - RNA, 20 nt, synthetic construct
  source 1..20: mol_type = other RNA
ccaccagacagcgggcgaag

SEQ ID NO: 4260 - RNA, 20 nt, synthetic construct
  source 1..20: mol_type = other RNA
ccaccagcctctggcatgtc

SEQ ID NO: 4261 - RNA, 20 nt, synthetic construct
  source 1..20: mol_type = other RNA
ccacccaaccccacatctgc

SEQ ID NO: 4262 - RNA, 20 nt, synthetic construct
  source 1..20: mol_type = other RNA
ccacctccttgttagtcgcc

SEQ ID NO: 4263 - RNA, 20 nt, synthetic construct
  source 1..20: mol_type = other RNA
ccacctcgcgctccacctcc

SEQ ID NO: 4264 - RNA, 20 nt, synthetic construct
  source 1..20: mol_type = other RNA
ccaccttggtcttgccttgc

SEQ ID NO: 4265 - RNA, 20 nt, synthetic construct
  source 1..20: mol_type = other RNA
ccacgagcgccagcgtgccc

SEQ ID NO: 4266 - RNA, 20 nt, synthetic construct
  source 1..20: mol_type = other RNA
ccacgctccgcgccagctct

SEQ ID NO: 4267 - RNA, 20 nt, synthetic construct
  source 1..20: mol_type = other RNA
ccactcggctgcgcgcttct

SEQ ID NO: 4268 - RNA, 20 nt, synthetic construct
  source 1..20: mol_type = other RNA
ccactgcgcgctggcgctgg

SEQ ID NO: 4269 - RNA, 20 nt, synthetic construct
  source 1..20: mol_type = other RNA
ccagacagcgggcgaagcgg

SEQ ID NO: 4270 - RNA, 20 nt, synthetic construct
  source 1..20: mol_type = other RNA
ccagaggctggtggcggccg

SEQ ID NO: 4271 - RNA, 20 nt, synthetic construct
  source 1..20: mol_type = other RNA
ccagcctctggcatgtctcc

SEQ ID NO: 4272 - RNA, 20 nt, synthetic construct
  source 1..20: mol_type = other RNA
ccagcgacacaagccagggc

SEQ ID NO: 4273 - RNA, 20 nt, synthetic construct
  source 1..20: mol_type = other RNA
ccagcgaggccacaagcggc

SEQ ID NO: 4274 - RNA, 20 nt, synthetic construct
  source 1..20: mol_type = other RNA
ccagcgccagcgcgcagtgg

SEQ ID NO: 4275 - RNA, 20 nt, synthetic construct
  source 1..20: mol_type = other RNA
ccagcgcgcagtggcgcagc

SEQ ID NO: 4276 - RNA, 20 nt, synthetic construct
  source 1..20: mol_type = other RNA
ccagcgtgcccgagcgctcc

SEQ ID NO: 4277 - RNA, 20 nt, synthetic construct
  source 1..20: mol_type = other RNA
ccagctctacgggttcgcgt

SEQ ID NO: 4278 - RNA, 20 nt, synthetic construct
  source 1..20: mol_type = other RNA
ccaggccgccggccgccacc

SEQ ID NO: 4279 - RNA, 20 nt, synthetic construct
  source 1..20: mol_type = other RNA
ccaggcggtgcagcgacgca

SEQ ID NO: 4280 - RNA, 20 nt, synthetic construct
  source 1..20: mol_type = other RNA
ccagggccgcgggcccgacg

SEQ ID NO: 4281 - RNA, 20 nt, synthetic construct
  source 1..20: mol_type = other RNA
ccagggtccagcgaggccac

SEQ ID NO: 4282 - RNA, 20 nt, synthetic construct
  source 1..20: mol_type = other RNA
ccaggttcaggatcacgccc

SEQ ID NO: 4283 - RNA, 20 nt, synthetic construct
  source 1..20: mol_type = other RNA
ccatcaagagcctgcaaggc

SEQ ID NO: 4284 - RNA, 20 nt, synthetic construct
  source 1..20: mol_type = other RNA
ccatgcgtcgctgcaccgcc

SEQ ID NO: 4285 - RNA, 20 nt, synthetic construct
  source 1..20: mol_type = other RNA
cccaaccccacatctgcacc

SEQ ID NO: 4286 - RNA, 20 nt, synthetic construct
  source 1..20: mol_type = other RNA
cccacatctgcacccacctt

SEQ ID NO: 4287 - RNA, 20 nt, synthetic construct
  source 1..20: mol_type = other RNA
cccaccttggtcttgccttg

SEQ ID NO: 4288 - RNA, 20 nt, synthetic construct
  source 1..20: mol_type = other RNA
cccagcgccagcgcgcagtg

SEQ ID NO: 4289 - RNA, 20 nt, synthetic construct
  source 1..20: mol_type = other RNA
ccccacatctgcacccacct

SEQ ID NO: 4290 - RNA, 20 nt, synthetic construct
  source 1..20: mol_type = other RNA
cccccgtgcagcgcgcagtt

SEQ ID NO: 4291 - RNA, 20 nt, synthetic construct
  source 1..20: mol_type = other RNA
ccccgatgcactgcgcctcc

SEQ ID NO: 4292 - RNA, 20 nt, synthetic construct
  source 1..20: mol_type = other RNA
ccccgcgctgctgcgccact

SEQ ID NO: 4293 - RNA, 20 nt, synthetic construct
  source 1..20: mol_type = other RNA
ccccgtgcagcgcgcagttg

SEQ ID NO: 4294 - RNA, 20 nt, synthetic construct
  source 1..20: mol_type = other RNA
cccgacgacctgcagcgcct

SEQ ID NO: 4295 - RNA, 20 nt, synthetic construct
  source 1..20: mol_type = other RNA
cccgagcgctccacctcgcg

SEQ ID NO: 4296 - RNA, 20 nt, synthetic construct
  source 1..20: mol_type = other RNA
cccgatgcactgcgcctcca

SEQ ID NO: 4297 - RNA, 20 nt, synthetic construct
  source 1..20: mol_type = other RNA
cccgcgctgctgcgccactg

SEQ ID NO: 4298 - RNA, 20 nt, synthetic construct
  source 1..20: mol_type = other RNA
cccgcggccctggcttgtgt

SEQ ID NO: 4299 - RNA, 20 nt, synthetic construct
  source 1..20: mol_type = other RNA
cccgctcgccttctccaagg

SEQ ID NO: 4300 - RNA, 20 nt, synthetic construct
  source 1..20: mol_type = other RNA
cccgctgtctggtggacgcc

SEQ ID NO: 4301 - RNA, 20 nt, synthetic construct
  source 1..20: mol_type = other RNA
cccgtagagctggcgcggag

SEQ ID NO: 4302 - RNA, 20 nt, synthetic construct
  source 1..20: mol_type = other RNA
cccgtgcagcgcgcagttgc

SEQ ID NO: 4303 - RNA, 20 nt, synthetic construct
  source 1..20: mol_type = other RNA
ccctggccgcttcgcccgct

SEQ ID NO: 4304 - RNA, 20 nt, synthetic construct
  source 1..20: mol_type = other RNA
ccctggcttgtgtcgctggc

SEQ ID NO: 4305 - RNA, 20 nt, synthetic construct
  source 1..20: mol_type = other RNA
ccgaagcagctcgtcctcct

SEQ ID NO: 4306 - RNA, 20 nt, synthetic construct
  source 1..20: mol_type = other RNA
ccgaatgcttgaacatgtgc

SEQ ID NO: 4307 - RNA, 20 nt, synthetic construct
  source 1..20: mol_type = other RNA
ccgacgacctgcagcgcctc

SEQ ID NO: 4308 - RNA, 20 nt, synthetic construct
  source 1..20: mol_type = other RNA
ccgagcgctccacctcgcgc

SEQ ID NO: 4309 - RNA, 20 nt, synthetic construct
  source 1..20: mol_type = other RNA
ccgaggctgccatcaagagc

SEQ ID NO: 4310 - RNA, 20 nt, synthetic construct
  source 1..20: mol_type = other RNA
ccgagtggctcttcccgctc

SEQ ID NO: 4311 - RNA, 20 nt, synthetic construct
  source 1..20: mol_type = other RNA
ccgatgcactgcgcctccaa

SEQ ID NO: 4312 - RNA, 20 nt, synthetic construct
  source 1..20: mol_type = other RNA
ccgcacggaccccgcgctgc

SEQ ID NO: 4313 - RNA, 20 nt, synthetic construct
  source 1..20: mol_type = other RNA
ccgccaccagcctctggcat

SEQ ID NO: 4314 - RNA, 20 nt, synthetic construct
  source 1..20: mol_type = other RNA
ccgccgcacggaccccgcgc

SEQ ID NO: 4315 - RNA, 20 nt, synthetic construct
  source 1..20: mol_type = other RNA
ccgccggccgccaccagcct

SEQ ID NO: 4316 - RNA, 20 nt, synthetic construct
  source 1..20: mol_type = other RNA
ccgcctggcccccgtgcagc

SEQ ID NO: 4317 - RNA, 20 nt, synthetic construct
  source 1..20: mol_type = other RNA
ccgcgccagctctacgggtt

SEQ ID NO: 4318 - RNA, 20 nt, synthetic construct
  source 1..20: mol_type = other RNA
ccgcgctgctgcgccactgc

SEQ ID NO: 4319 - RNA, 20 nt, synthetic construct
  source 1..20: mol_type = other RNA
ccgcggccctggcttgtgtc

SEQ ID NO: 4320 - RNA, 20 nt, synthetic construct
  source 1..20: mol_type = other RNA
ccgcgggcccgacgacctgc

SEQ ID NO: 4321 - RNA, 20 nt, synthetic construct
  source 1..20: mol_type = other RNA
ccgcgtccaggccgccggcc

SEQ ID NO: 4322 - RNA, 20 nt, synthetic construct
  source 1..20: mol_type = other RNA
ccgcgtggcgcgcattgggc

SEQ ID NO: 4323 - RNA, 20 nt, synthetic construct
  source 1..20: mol_type = other RNA
ccgctactgcgaggcaggcg

SEQ ID NO: 4324 - RNA, 20 nt, synthetic construct
  source 1..20: mol_type = other RNA
ccgctcgccttctccaagga

SEQ ID NO: 4325 - RNA, 20 nt, synthetic construct
  source 1..20: mol_type = other RNA
ccgctgtctggtggacgcca

SEQ ID NO: 4326 - RNA, 20 nt, synthetic construct
  source 1..20: mol_type = other RNA
ccgcttcgcccgctgtctgg

SEQ ID NO: 4327 - RNA, 20 nt, synthetic construct
  source 1..20: mol_type = other RNA
ccgcttggaggcgcagtgca

SEQ ID NO: 4328 - RNA, 20 nt, synthetic construct
  source 1..20: mol_type = other RNA
ccgcttgtggcctcgctgga

SEQ ID NO: 4329 - RNA, 20 nt, synthetic construct
  source 1..20: mol_type = other RNA
ccggccgccaccagcctctg

SEQ ID NO: 4330 - RNA, 20 nt, synthetic construct
  source 1..20: mol_type = other RNA
ccggcggcctggacgcggtg

SEQ ID NO: 4331 - RNA, 20 nt, synthetic construct
  source 1..20: mol_type = other RNA
ccgtagagctggcgcggagc

SEQ ID NO: 4332 - RNA, 20 nt, synthetic construct
  source 1..20: mol_type = other RNA
ccgtgcagcgcgcagttgcc

SEQ ID NO: 4333 - RNA, 20 nt, synthetic construct
  source 1..20: mol_type = other RNA
ccgtgcggcggcaccaatac

SEQ ID NO: 4334 - RNA, 20 nt, synthetic construct
  source 1..20: mol_type = other RNA
ccgttgctcgactctaaccg

SEQ ID NO: 4335 - RNA, 20 nt, synthetic construct
  source 1..20: mol_type = other RNA
cctccaagcggttagagtcg

SEQ ID NO: 4336 - RNA, 20 nt, synthetic construct
  source 1..20: mol_type = other RNA
cctccgaatgcttgaacatg

SEQ ID NO: 4337 - RNA, 20 nt, synthetic construct
  source 1..20: mol_type = other RNA
cctccttggagaaggcgagc

SEQ ID NO: 4338 - RNA, 20 nt, synthetic construct
  source 1..20: mol_type = other RNA
cctccttgttagtcgccaac

SEQ ID NO: 4339 - RNA, 20 nt, synthetic construct
  source 1..20: mol_type = other RNA
cctcgcagtagcggtgttgg

SEQ ID NO: 4340 - RNA, 20 nt, synthetic construct
  source 1..20: mol_type = other RNA
cctcgcgctccacctccttg

SEQ ID NO: 4341 - RNA, 20 nt, synthetic construct
  source 1..20: mol_type = other RNA
cctcgctggaccctggccgc

SEQ ID NO: 4342 - RNA, 20 nt, synthetic construct
  source 1..20: mol_type = other RNA
cctcggcgcagaggtagaaa

SEQ ID NO: 4343 - RNA, 20 nt, synthetic construct
  source 1..20: mol_type = other RNA
cctcgtgccgttgctcgact

SEQ ID NO: 4344 - RNA, 20 nt, synthetic construct
  source 1..20: mol_type = other RNA
cctctgcgccgaggctgcca

SEQ ID NO: 4345 - RNA, 20 nt, synthetic construct
  source 1..20: mol_type = other RNA
cctctggcatgtctcctccg

SEQ ID NO: 4346 - RNA, 20 nt, synthetic construct
  source 1..20: mol_type = other RNA
cctgaacctggcgaaggaac

SEQ ID NO: 4347 - RNA, 20 nt, synthetic construct
  source 1..20: mol_type = other RNA
cctgcaaggcaagaccaagg

SEQ ID NO: 4348 - RNA, 20 nt, synthetic construct
  source 1..20: mol_type = other RNA
cctgcagcgcctcgtgccgt

SEQ ID NO: 4349 - RNA, 20 nt, synthetic construct
  source 1..20: mol_type = other RNA
cctgccacgctccgcgccag

SEQ ID NO: 4350 - RNA, 20 nt, synthetic construct
  source 1..20: mol_type = other RNA
cctgcctcgcagtagcggtg

SEQ ID NO: 4351 - RNA, 20 nt, synthetic construct
  source 1..20: mol_type = other RNA
cctggacgcggtgctgtatt

SEQ ID NO: 4352 - RNA, 20 nt, synthetic construct
  source 1..20: mol_type = other RNA
cctggcccccgtgcagcgcg

SEQ ID NO: 4353 - RNA, 20 nt, synthetic construct
  source 1..20: mol_type = other RNA
cctggccgcttcgcccgctg

SEQ ID NO: 4354 - RNA, 20 nt, synthetic construct
  source 1..20: mol_type = other RNA
cctggcgaaggaacgcgaac

SEQ ID NO: 4355 - RNA, 20 nt, synthetic construct
  source 1..20: mol_type = other RNA
cctggcttgtgtcgctggcg

SEQ ID NO: 4356 - RNA, 20 nt, synthetic construct
  source 1..20: mol_type = other RNA
ccttcgccaggttcaggatc

SEQ ID NO: 4357 - RNA, 20 nt, synthetic construct
  source 1..20: mol_type = other RNA
ccttctccaaggaggacgag

SEQ ID NO: 4358 - RNA, 20 nt, synthetic construct
  source 1..20: mol_type = other RNA
ccttgcaggctcttgatggc

SEQ ID NO: 4359 - RNA, 20 nt, synthetic construct
  source 1..20: mol_type = other RNA
ccttggagaaggcgagcggg

SEQ ID NO: 4360 - RNA, 20 nt, synthetic construct
  source 1..20: mol_type = other RNA
ccttggtcttgccttgcagg

SEQ ID NO: 4361 - RNA, 20 nt, synthetic construct
  source 1..20: mol_type = other RNA
ccttgttagtcgccaacacc

SEQ ID NO: 4362 - RNA, 20 nt, synthetic construct
  source 1..20: mol_type = other RNA
cgaacccgtagagctggcgc

SEQ ID NO: 4363 - RNA, 20 nt, synthetic construct
  source 1..20: mol_type = other RNA
cgaagcagctcgtcctcctt

SEQ ID NO: 4364 - RNA, 20 nt, synthetic construct
  source 1..20: mol_type = other RNA
cgaagcggccagggtccagc

SEQ ID NO: 4365 - RNA, 20 nt, synthetic construct
  source 1..20: mol_type = other RNA
cgaaggaacgcgaacccgta

SEQ ID NO: 4366 - RNA, 20 nt, synthetic construct
  source 1..20: mol_type = other RNA
cgaatgcttgaacatgtgct

SEQ ID NO: 4367 - RNA, 20 nt, synthetic construct
  source 1..20: mol_type = other RNA
cgacacaagccagggccgcg

SEQ ID NO: 4368 - RNA, 20 nt, synthetic construct
  source 1..20: mol_type = other RNA
cgacctgcagcgcctcgtgc

SEQ ID NO: 4369 - RNA, 20 nt, synthetic construct
  source 1..20: mol_type = other RNA
cgacgacctgcagcgcctcg

SEQ ID NO: 4370 - RNA, 20 nt, synthetic construct
  source 1..20: mol_type = other RNA
cgacgcatggtagagaagcg

SEQ ID NO: 4371 - RNA, 20 nt, synthetic construct
  source 1..20: mol_type = other RNA
cgactaacaaggaggtggag

SEQ ID NO: 4372 - RNA, 20 nt, synthetic construct
  source 1..20: mol_type = other RNA
cgactctaaccgcttggagg

SEQ ID NO: 4373 - RNA, 20 nt, synthetic construct
  source 1..20: mol_type = other RNA
cgagcaacggcacgaggcgc

SEQ ID NO: 4374 - RNA, 20 nt, synthetic construct
  source 1..20: mol_type = other RNA
cgagcgccagcgtgcccgag

SEQ ID NO: 4375 - RNA, 20 nt, synthetic construct
  source 1..20: mol_type = other RNA
cgagcgctccacctcgcgct

SEQ ID NO: 4376 - RNA, 20 nt, synthetic construct
  source 1..20: mol_type = other RNA
cgagcgggaagagccactcg

SEQ ID NO: 4377 - RNA, 20 nt, synthetic construct
  source 1..20: mol_type = other RNA
cgagctgcttcggctgcacg

SEQ ID NO: 4378 - RNA, 20 nt, synthetic construct
  source 1..20: mol_type = other RNA
cgaggcaggcgtgcagccga

SEQ ID NO: 4379 - RNA, 20 nt, synthetic construct
  source 1..20: mol_type = other RNA
cgaggccacaagcggctcca

SEQ ID NO: 4380 - RNA, 20 nt, synthetic construct
  source 1..20: mol_type = other RNA
cgaggcgctgcaggtcgtcg

SEQ ID NO: 4381 - RNA, 20 nt, synthetic construct
  source 1..20: mol_type = other RNA
cgaggctgccatcaagagcc

SEQ ID NO: 4382 - RNA, 20 nt, synthetic construct
  source 1..20: mol_type = other RNA
cgaggtggagcgctcgggca

SEQ ID NO: 4383 - RNA, 20 nt, synthetic construct
  source 1..20: mol_type = other RNA
cgagtggctcttcccgctcg

SEQ ID NO: 4384 - RNA, 20 nt, synthetic construct
  source 1..20: mol_type = other RNA
cgatgcactgcgcctccaag

SEQ ID NO: 4385 - RNA, 20 nt, synthetic construct
  source 1..20: mol_type = other RNA
cgcacggaccccgcgctgct

SEQ ID NO: 4386 - RNA, 20 nt, synthetic construct
  source 1..20: mol_type = other RNA
cgcagaggtagaaagccccg

SEQ ID NO: 4387 - RNA, 20 nt, synthetic construct
  source 1..20: mol_type = other RNA
cgcagcagcgcggggtccgt

SEQ ID NO: 4388 - RNA, 20 nt, synthetic construct
  source 1..20: mol_type = other RNA
cgcagccgagtggctcttcc

SEQ ID NO: 4389 - RNA, 20 nt, synthetic construct
  source 1..20: mol_type = other RNA
cgcagtagcggtgttggcga

SEQ ID NO: 4390 - RNA, 20 nt, synthetic construct
  source 1..20: mol_type = other RNA
cgcagtgcatcggggctttc

SEQ ID NO: 4391 - RNA, 20 nt, synthetic construct
  source 1..20: mol_type = other RNA
cgcagtggcgcagcagcgcg

SEQ ID NO: 4392 - RNA, 20 nt, synthetic construct
  source 1..20: mol_type = other RNA
cgcagttgcccagcgccagc

SEQ ID NO: 4393 - RNA, 20 nt, synthetic construct
  source 1..20: mol_type = other RNA
cgcatggtagagaagcgcgc

SEQ ID NO: 4394 - RNA, 20 nt, synthetic construct
  source 1..20: mol_type = other RNA
cgcattgggctgggcgtgat

SEQ ID NO: 4395 - RNA, 20 nt, synthetic construct
  source 1..20: mol_type = other RNA
cgccaacaccgctactgcga

SEQ ID NO: 4396 - RNA, 20 nt, synthetic construct
  source 1..20: mol_type = other RNA
cgccaccagcctctggcatg

SEQ ID NO: 4397 - RNA, 20 nt, synthetic construct
  source 1..20: mol_type = other RNA
cgccactgcgcgctggcgct

SEQ ID NO: 4398 - RNA, 20 nt, synthetic construct
  source 1..20: mol_type = other RNA
cgccagcgacacaagccagg

SEQ ID NO: 4399 - RNA, 20 nt, synthetic construct
  source 1..20: mol_type = other RNA
cgccagcgcgcagtggcgca

SEQ ID NO: 4400 - RNA, 20 nt, synthetic construct
  source 1..20: mol_type = other RNA
cgccagcgtgcccgagcgct

SEQ ID NO: 4401 - RNA, 20 nt, synthetic construct
  source 1..20: mol_type = other RNA
cgccagctctacgggttcgc

SEQ ID NO: 4402 - RNA, 20 nt, synthetic construct
  source 1..20: mol_type = other RNA
cgccaggttcaggatcacgc

SEQ ID NO: 4403 - RNA, 20 nt, synthetic construct
  source 1..20: mol_type = other RNA
cgcccagcccaatgcgcgcc

SEQ ID NO: 4404 - RNA, 20 nt, synthetic construct
  source 1..20: mol_type = other RNA
cgcccgctgtctggtggacg

SEQ ID NO: 4405 - RNA, 20 nt, synthetic construct
  source 1..20: mol_type = other RNA
cgccgaggctgccatcaaga

SEQ ID NO: 4406 - RNA, 20 nt, synthetic construct
  source 1..20: mol_type = other RNA
cgccgcacggaccccgcgct

SEQ ID NO: 4407 - RNA, 20 nt, synthetic construct
  source 1..20: mol_type = other RNA
cgccggccgccaccagcctc

SEQ ID NO: 4408 - RNA, 20 nt, synthetic construct
  source 1..20: mol_type = other RNA
cgcctccaagcggttagagt

SEQ ID NO: 4409 - RNA, 20 nt, synthetic construct
  source 1..20: mol_type = other RNA
cgcctcgtgccgttgctcga

SEQ ID NO: 4410 - RNA, 20 nt, synthetic construct
  source 1..20: mol_type = other RNA
cgcctgcctcgcagtagcgg

SEQ ID NO: 4411 - RNA, 20 nt, synthetic construct
  source 1..20: mol_type = other RNA
cgcctggcccccgtgcagcg

SEQ ID NO: 4412 - RNA, 20 nt, synthetic construct
  source 1..20: mol_type = other RNA
cgccttctccaaggaggacg

SEQ ID NO: 4413 - RNA, 20 nt, synthetic construct
  source 1..20: mol_type = other RNA
cgcgaacccgtagagctggc

SEQ ID NO: 4414 - RNA, 20 nt, synthetic construct
  source 1..20: mol_type = other RNA
cgcgaggtggagcgctcggg

SEQ ID NO: 4415 - RNA, 20 nt, synthetic construct
  source 1..20: mol_type = other RNA
cgcgcagccgagtggctctt

SEQ ID NO: 4416 - RNA, 20 nt, synthetic construct
  source 1..20: mol_type = other RNA
cgcgcagtggcgcagcagcg

SEQ ID NO: 4417 - RNA, 20 nt, synthetic construct
  source 1..20: mol_type = other RNA
cgcgcagttgcccagcgcca

SEQ ID NO: 4418 - RNA, 20 nt, synthetic construct
  source 1..20: mol_type = other RNA
cgcgcattgggctgggcgtg

SEQ ID NO: 4419 - RNA, 20 nt, synthetic construct
  source 1..20: mol_type = other RNA
cgcgccagctctacgggttc

SEQ ID NO: 4420 - RNA, 20 nt, synthetic construct
  source 1..20: mol_type = other RNA
cgcgctccacctccttgtta

SEQ ID NO: 4421 - RNA, 20 nt, synthetic construct
  source 1..20: mol_type = other RNA
cgcgctgcacgggggccagg

SEQ ID NO: 4422 - RNA, 20 nt, synthetic construct
  source 1..20: mol_type = other RNA
cgcgctgctgcgccactgcg

SEQ ID NO: 4423 - RNA, 20 nt, synthetic construct
  source 1..20: mol_type = other RNA
cgcgctggcgctgggcaact

SEQ ID NO: 4424 - RNA, 20 nt, synthetic construct
  source 1..20: mol_type = other RNA
cgcgcttctctaccatgcgt

SEQ ID NO: 4425 - RNA, 20 nt, synthetic construct
  source 1..20: mol_type = other RNA
cgcggagcgtggcaggcatc

SEQ ID NO: 4426 - RNA, 20 nt, synthetic construct
  source 1..20: mol_type = other RNA
cgcggccctggcttgtgtcg

SEQ ID NO: 4427 - RNA, 20 nt, synthetic construct
  source 1..20: mol_type = other RNA
cgcgggcccgacgacctgca

SEQ ID NO: 4428 - RNA, 20 nt, synthetic construct
  source 1..20: mol_type = other RNA
cgcggggtccgtgcggcggc

SEQ ID NO: 4429 - RNA, 20 nt, synthetic construct
  source 1..20: mol_type = other RNA
cgcggtgctgtattggtgcc

SEQ ID NO: 4430 - RNA, 20 nt, synthetic construct
  source 1..20: mol_type = other RNA
cgcgtccaggccgccggccg

SEQ ID NO: 4431 - RNA, 20 nt, synthetic construct
  source 1..20: mol_type = other RNA
cgcgtggcgcgcattgggct

SEQ ID NO: 4432 - RNA, 20 nt, synthetic construct
  source 1..20: mol_type = other RNA
cgcgttccttcgccaggttc

SEQ ID NO: 4433 - RNA, 20 nt, synthetic construct
  source 1..20: mol_type = other RNA
cgctactgcgaggcaggcgt

SEQ ID NO: 4434 - RNA, 20 nt, synthetic construct
  source 1..20: mol_type = other RNA
cgctccacctccttgttagt

SEQ ID NO: 4435 - RNA, 20 nt, synthetic construct
  source 1..20: mol_type = other RNA
cgctccacctcgcgctccac

SEQ ID NO: 4436 - RNA, 20 nt, synthetic construct
  source 1..20: mol_type = other RNA
cgctccgcgccagctctacg

SEQ ID NO: 4437 - RNA, 20 nt, synthetic construct
  source 1..20: mol_type = other RNA
cgctcgccttctccaaggag

SEQ ID NO: 4438 - RNA, 20 nt, synthetic construct
  source 1..20: mol_type = other RNA
cgctcgggcacgctggcgct

SEQ ID NO: 4439 - RNA, 20 nt, synthetic construct
  source 1..20: mol_type = other RNA
cgctcgtggagccgcttgtg

SEQ ID NO: 4440 - RNA, 20 nt, synthetic construct
  source 1..20: mol_type = other RNA
cgctgcaccgcctggccccc

SEQ ID NO: 4441 - RNA, 20 nt, synthetic construct
  source 1..20: mol_type = other RNA
cgctgcacgggggccaggcg

SEQ ID NO: 4442 - RNA, 20 nt, synthetic construct
  source 1..20: mol_type = other RNA
cgctgcaggtcgtcgggccc

SEQ ID NO: 4443 - RNA, 20 nt, synthetic construct
  source 1..20: mol_type = other RNA
cgctgctgcgccactgcgcg

SEQ ID NO: 4444 - RNA, 20 nt, synthetic construct
  source 1..20: mol_type = other RNA
cgctggaccctggccgcttc

SEQ ID NO: 4445 - RNA, 20 nt, synthetic construct
  source 1..20: mol_type = other RNA
cgctggcgctcgtggagccg

SEQ ID NO: 4446 - RNA, 20 nt, synthetic construct
  source 1..20: mol_type = other RNA
cgctggcgctgggcaactgc

SEQ ID NO: 4447 - RNA, 20 nt, synthetic construct
  source 1..20: mol_type = other RNA
cgctggcgtccaccagacag

SEQ ID NO: 4448 - RNA, 20 nt, synthetic construct
  source 1..20: mol_type = other RNA
cgctgggcaactgcgcgctg

SEQ ID NO: 4449 - RNA, 20 nt, synthetic construct
  source 1..20: mol_type = other RNA
cgctgtctggtggacgccag

SEQ ID NO: 4450 - RNA, 20 nt, synthetic construct
  source 1..20: mol_type = other RNA
cgcttcgcccgctgtctggt

SEQ ID NO: 4451 - RNA, 20 nt, synthetic construct
  source 1..20: mol_type = other RNA
cgcttctctaccatgcgtcg

SEQ ID NO: 4452 - RNA, 20 nt, synthetic construct
  source 1..20: mol_type = other RNA
cgcttggaggcgcagtgcat

SEQ ID NO: 4453 - RNA, 20 nt, synthetic construct
  source 1..20: mol_type = other RNA
cgcttgtggcctcgctggac

SEQ ID NO: 4454 - RNA, 20 nt, synthetic construct
  source 1..20: mol_type = other RNA
cggaccccgcgctgctgcgc

SEQ ID NO: 4455 - RNA, 20 nt, synthetic construct
  source 1..20: mol_type = other RNA
cggagcgtggcaggcatctt

SEQ ID NO: 4456 - RNA, 20 nt, synthetic construct
  source 1..20: mol_type = other RNA
cggaggagacatgccagagg

SEQ ID NO: 4457 - RNA, 20 nt, synthetic construct
  source 1..20: mol_type = other RNA
cggcaccaatacagcaccgc

SEQ ID NO: 4458 - RNA, 20 nt, synthetic construct
  source 1..20: mol_type = other RNA
cggcacgaggcgctgcaggt

SEQ ID NO: 4459 - RNA, 20 nt, synthetic construct
  source 1..20: mol_type = other RNA
cggccagggtccagcgaggc

SEQ ID NO: 4460 - RNA, 20 nt, synthetic construct
  source 1..20: mol_type = other RNA
cggccctggcttgtgtcgct

SEQ ID NO: 4461 - RNA, 20 nt, synthetic construct
  source 1..20: mol_type = other RNA
cggccgccaccagcctctgg

SEQ ID NO: 4462 - RNA, 20 nt, synthetic construct
  source 1..20: mol_type = other RNA
cggccggcggcctggacgcg

SEQ ID NO: 4463 - RNA, 20 nt, synthetic construct
  source 1..20: mol_type = other RNA
cggcctggacgcggtgctgt

SEQ ID NO: 4464 - RNA, 20 nt, synthetic construct
  source 1..20: mol_type = other RNA
cggcgcagaggtagaaagcc

SEQ ID NO: 4465 - RNA, 20 nt, synthetic construct
  source 1..20: mol_type = other RNA
cggcggcaccaatacagcac

SEQ ID NO: 4466 - RNA, 20 nt, synthetic construct
  source 1..20: mol_type = other RNA
cggcggcctggacgcggtgc

SEQ ID NO: 4467 - RNA, 20 nt, synthetic construct
  source 1..20: mol_type = other RNA
cggctccacgagcgccagcg

SEQ ID NO: 4468 - RNA, 20 nt, synthetic construct
  source 1..20: mol_type = other RNA
cggctgcacgcctgcctcgc

SEQ ID NO: 4469 - RNA, 20 nt, synthetic construct
  source 1..20: mol_type = other RNA
cggctgcgcgcttctctacc

SEQ ID NO: 4470 - RNA, 20 nt, synthetic construct
  source 1..20: mol_type = other RNA
cgggaagagccactcggctg

SEQ ID NO: 4471 - RNA, 20 nt, synthetic construct
  source 1..20: mol_type = other RNA
cgggcacgctggcgctcgtg

SEQ ID NO: 4472 - RNA, 20 nt, synthetic construct
  source 1..20: mol_type = other RNA
cgggcccgacgacctgcagc

SEQ ID NO: 4473 - RNA, 20 nt, synthetic construct
  source 1..20: mol_type = other RNA
cgggcccgcggccctggctt

SEQ ID NO: 4474 - RNA, 20 nt, synthetic construct
  source 1..20: mol_type = other RNA
cgggcgaagcggccagggtc

SEQ ID NO: 4475 - RNA, 20 nt, synthetic construct
  source 1..20: mol_type = other RNA
cggggctttctacctctgcg

SEQ ID NO: 4476 - RNA, 20 nt, synthetic construct
  source 1..20: mol_type = other RNA
cgggggccaggcggtgcagc

SEQ ID NO: 4477 - RNA, 20 nt, synthetic construct
  source 1..20: mol_type = other RNA
cggggtccgtgcggcggcac

SEQ ID NO: 4478 - RNA, 20 nt, synthetic construct
  source 1..20: mol_type = other RNA
cgggttcgcgttccttcgcc

SEQ ID NO: 4479 - RNA, 20 nt, synthetic construct
  source 1..20: mol_type = other RNA
cggtgcagcgacgcatggta

SEQ ID NO: 4480 - RNA, 20 nt, synthetic construct
  source 1..20: mol_type = other RNA
cggtgctgtattggtgccgc

SEQ ID NO: 4481 - RNA, 20 nt, synthetic construct
  source 1..20: mol_type = other RNA
cggtgttggcgactaacaag

SEQ ID NO: 4482 - RNA, 20 nt, synthetic construct
  source 1..20: mol_type = other RNA
cggttagagtcgagcaacgg

SEQ ID NO: 4483 - RNA, 20 nt, synthetic construct
  source 1..20: mol_type = other RNA
cgtagagctggcgcggagcg

SEQ ID NO: 4484 - RNA, 20 nt, synthetic construct
  source 1..20: mol_type = other RNA
cgtccaccagacagcgggcg

SEQ ID NO: 4485 - RNA, 20 nt, synthetic construct
  source 1..20: mol_type = other RNA
cgtccaggccgccggccgcc

SEQ ID NO: 4486 - RNA, 20 nt, synthetic construct
  source 1..20: mol_type = other RNA
cgtcctccttggagaaggcg

SEQ ID NO: 4487 - RNA, 20 nt, synthetic construct
  source 1..20: mol_type = other RNA
cgtcgctgcaccgcctggcc

SEQ ID NO: 4488 - RNA, 20 nt, synthetic construct
  source 1..20: mol_type = other RNA
cgtcgggcccgcggccctgg

SEQ ID NO: 4489 - RNA, 20 nt, synthetic construct
  source 1..20: mol_type = other RNA
cgtgatcctgaacctggcga

SEQ ID NO: 4490 - RNA, 20 nt, synthetic construct
  source 1..20: mol_type = other RNA
cgtgcagccgaagcagctcg

SEQ ID NO: 4491 - RNA, 20 nt, synthetic construct
  source 1..20: mol_type = other RNA
cgtgcagcgcgcagttgccc

SEQ ID NO: 4492 - RNA, 20 nt, synthetic construct
  source 1..20: mol_type = other RNA
cgtgcccgagcgctccacct

SEQ ID NO: 4493 - RNA, 20 nt, synthetic construct
  source 1..20: mol_type = other RNA
cgtgccgttgctcgactcta

SEQ ID NO: 4494 - RNA, 20 nt, synthetic construct
  source 1..20: mol_type = other RNA
cgtgcggcggcaccaataca

SEQ ID NO: 4495 - RNA, 20 nt, synthetic construct
  source 1..20: mol_type = other RNA
cgtggagccgcttgtggcct

SEQ ID NO: 4496 - RNA, 20 nt, synthetic construct
  source 1..20: mol_type = other RNA
cgtggcaggcatcttggagc

SEQ ID NO: 4497 - RNA, 20 nt, synthetic construct
  source 1..20: mol_type = other RNA
cgtggcgcgcattgggctgg

SEQ ID NO: 4498 - RNA, 20 nt, synthetic construct
  source 1..20: mol_type = other RNA
cgttccttcgccaggttcag

SEQ ID NO: 4499 - RNA, 20 nt, synthetic construct
  source 1..20: mol_type = other RNA
cgttgctcgactctaaccgc

SEQ ID NO: 4500 - RNA, 20 nt, synthetic construct
  source 1..20: mol_type = other RNA
ctaacaaggaggtggagcgc

SEQ ID NO: 4501 - RNA, 20 nt, synthetic construct
  source 1..20: mol_type = other RNA
ctaaccgcttggaggcgcag

SEQ ID NO: 4502 - RNA, 20 nt, synthetic construct
  source 1..20: mol_type = other RNA
ctaccatgcgtcgctgcacc

SEQ ID NO: 4503 - RNA, 20 nt, synthetic construct
  source 1..20: mol_type = other RNA
ctacctctgcgccgaggctg

SEQ ID NO: 4504 - RNA, 20 nt, synthetic construct
  source 1..20: mol_type = other RNA
ctacgggttcgcgttccttc

SEQ ID NO: 4505 - RNA, 20 nt, synthetic construct
  source 1..20: mol_type = other RNA
ctactgcgaggcaggcgtgc

SEQ ID NO: 4506 - RNA, 20 nt, synthetic construct
  source 1..20: mol_type = other RNA
ctccaagatgcctgccacgc

SEQ ID NO: 4507 - RNA, 20 nt, synthetic construct
  source 1..20: mol_type = other RNA
ctccaagcggttagagtcga

SEQ ID NO: 4508 - RNA, 20 nt, synthetic construct
  source 1..20: mol_type = other RNA
ctccaaggaggacgagctgc

SEQ ID NO: 4509 - RNA, 20 nt, synthetic construct
  source 1..20: mol_type = other RNA
ctccacctccttgttagtcg

SEQ ID NO: 4510 - RNA, 20 nt, synthetic construct
  source 1..20: mol_type = other RNA
ctccacctcgcgctccacct

SEQ ID NO: 4511 - RNA, 20 nt, synthetic construct
  source 1..20: mol_type = other RNA
ctccacgagcgccagcgtgc

SEQ ID NO: 4512 - RNA, 20 nt, synthetic construct
  source 1..20: mol_type = other RNA
ctccgaatgcttgaacatgt

SEQ ID NO: 4513 - RNA, 20 nt, synthetic construct
  source 1..20: mol_type = other RNA
ctccgcgccagctctacggg

SEQ ID NO: 4514 - RNA, 20 nt, synthetic construct
  source 1..20: mol_type = other RNA
ctcctccgaatgcttgaaca

SEQ ID NO: 4515 - RNA, 20 nt, synthetic construct
  source 1..20: mol_type = other RNA
ctccttggagaaggcgagcg

SEQ ID NO: 4516 - RNA, 20 nt, synthetic construct
  source 1..20: mol_type = other RNA
ctccttgttagtcgccaaca

SEQ ID NO: 4517 - RNA, 20 nt, synthetic construct
  source 1..20: mol_type = other RNA
ctcgactctaaccgcttgga

SEQ ID NO: 4518 - RNA, 20 nt, synthetic construct
  source 1..20: mol_type = other RNA
ctcgcagtagcggtgttggc

SEQ ID NO: 4519 - RNA, 20 nt, synthetic construct
  source 1..20: mol_type = other RNA
ctcgccttctccaaggagga

SEQ ID NO: 4520 - RNA, 20 nt, synthetic construct
  source 1..20: mol_type = other RNA
ctcgcgctccacctccttgt

SEQ ID NO: 4521 - RNA, 20 nt, synthetic construct
  source 1..20: mol_type = other RNA
ctcgctggaccctggccgct

SEQ ID NO: 4522 - RNA, 20 nt, synthetic construct
  source 1..20: mol_type = other RNA
ctcggcgcagaggtagaaag

SEQ ID NO: 4523 - RNA, 20 nt, synthetic construct
  source 1..20: mol_type = other RNA
ctcggctgcgcgcttctcta

SEQ ID NO: 4524 - RNA, 20 nt, synthetic construct
  source 1..20: mol_type = other RNA
ctcgggcacgctggcgctcg

SEQ ID NO: 4525 - RNA, 20 nt, synthetic construct
  source 1..20: mol_type = other RNA
ctcgtcctccttggagaagg

SEQ ID NO: 4526 - RNA, 20 nt, synthetic construct
  source 1..20: mol_type = other RNA
ctcgtgccgttgctcgactc

SEQ ID NO: 4527 - RNA, 20 nt, synthetic construct
  source 1..20: mol_type = other RNA
ctcgtggagccgcttgtggc

SEQ ID NO: 4528 - RNA, 20 nt, synthetic construct
  source 1..20: mol_type = other RNA
ctctaaccgcttggaggcgc

SEQ ID NO: 4529 - RNA, 20 nt, synthetic construct
  source 1..20: mol_type = other RNA
ctctaccatgcgtcgctgca

SEQ ID NO: 4530 - RNA, 20 nt, synthetic construct
  source 1..20: mol_type = other RNA
ctctacgggttcgcgttcct

SEQ ID NO: 4531 - RNA, 20 nt, synthetic construct
  source 1..20: mol_type = other RNA
ctctgcgccgaggctgccat

SEQ ID NO: 4532 - RNA, 20 nt, synthetic construct
  source 1..20: mol_type = other RNA
ctctggcatgtctcctccga

SEQ ID NO: 4533 - RNA, 20 nt, synthetic construct
  source 1..20: mol_type = other RNA
ctcttcccgctcgccttctc

SEQ ID NO: 4534 - RNA, 20 nt, synthetic construct
  source 1..20: mol_type = other RNA
ctcttgatggcagcctcggc

SEQ ID NO: 4535 - RNA, 20 nt, synthetic construct
  source 1..20: mol_type = other RNA
ctgaacctggcgaaggaacg

SEQ ID NO: 4536 - RNA, 20 nt, synthetic construct
  source 1..20: mol_type = other RNA
ctgcaaggcaagaccaaggt

SEQ ID NO: 4537 - RNA, 20 nt, synthetic construct
  source 1..20: mol_type = other RNA
ctgcacccaccttggtcttg

SEQ ID NO: 4538 - RNA, 20 nt, synthetic construct
  source 1..20: mol_type = other RNA
ctgcaccgcctggcccccgt

SEQ ID NO: 4539 - RNA, 20 nt, synthetic construct
  source 1..20: mol_type = other RNA
ctgcacgcctgcctcgcagt

SEQ ID NO: 4540 - RNA, 20 nt, synthetic construct
  source 1..20: mol_type = other RNA
ctgcacgggggccaggcggt

SEQ ID NO: 4541 - RNA, 20 nt, synthetic construct
  source 1..20: mol_type = other RNA
ctgcagcgcctcgtgccgtt

SEQ ID NO: 4542 - RNA, 20 nt, synthetic construct
  source 1..20: mol_type = other RNA
ctgcaggtcgtcgggcccgc

SEQ ID NO: 4543 - RNA, 20 nt, synthetic construct
  source 1..20: mol_type = other RNA
ctgccacgctccgcgccagc

SEQ ID NO: 4544 - RNA, 20 nt, synthetic construct
  source 1..20: mol_type = other RNA
ctgccatcaagagcctgcaa

SEQ ID NO: 4545 - RNA, 20 nt, synthetic construct
  source 1..20: mol_type = other RNA
ctgcctcgcagtagcggtgt

SEQ ID NO: 4546 - RNA, 20 nt, synthetic construct
  source 1..20: mol_type = other RNA
ctgcgaggcaggcgtgcagc

SEQ ID NO: 4547 - RNA, 20 nt, synthetic construct
  source 1..20: mol_type = other RNA
ctgcgccactgcgcgctggc

SEQ ID NO: 4548 - RNA, 20 nt, synthetic construct
  source 1..20: mol_type = other RNA
ctgcgccgaggctgccatca

SEQ ID NO: 4549 - RNA, 20 nt, synthetic construct
  source 1..20: mol_type = other RNA
ctgcgcctccaagcggttag

SEQ ID NO: 4550 - RNA, 20 nt, synthetic construct
  source 1..20: mol_type = other RNA
ctgcgcgctgcacgggggcc

SEQ ID NO: 4551 - RNA, 20 nt, synthetic construct
  source 1..20: mol_type = other RNA
ctgcgcgctggcgctgggca

SEQ ID NO: 4552 - RNA, 20 nt, synthetic construct
  source 1..20: mol_type = other RNA
ctgcgcgcttctctaccatg

SEQ ID NO: 4553 - RNA, 20 nt, synthetic construct
  source 1..20: mol_type = other RNA
ctgctgcgccactgcgcgct

SEQ ID NO: 4554 - RNA, 20 nt, synthetic construct
  source 1..20: mol_type = other RNA
ctgcttcggctgcacgcctg

SEQ ID NO: 4555 - RNA, 20 nt, synthetic construct
  source 1..20: mol_type = other RNA
ctggaccctggccgcttcgc

SEQ ID NO: 4556 - RNA, 20 nt, synthetic construct
  source 1..20: mol_type = other RNA
ctggacgcggtgctgtattg

SEQ ID NO: 4557 - RNA, 20 nt, synthetic construct
  source 1..20: mol_type = other RNA
ctggcatgtctcctccgaat

SEQ ID NO: 4558 - RNA, 20 nt, synthetic construct
  source 1..20: mol_type = other RNA
ctggcccccgtgcagcgcgc

SEQ ID NO: 4559 - RNA, 20 nt, synthetic construct
  source 1..20: mol_type = other RNA
ctggccgcttcgcccgctgt

SEQ ID NO: 4560 - RNA, 20 nt, synthetic construct
  source 1..20: mol_type = other RNA
ctggcgaaggaacgcgaacc

SEQ ID NO: 4561 - RNA, 20 nt, synthetic construct
  source 1..20: mol_type = other RNA
ctggcgcggagcgtggcagg

SEQ ID NO: 4562 - RNA, 20 nt, synthetic construct
  source 1..20: mol_type = other RNA
ctggcgctcgtggagccgct

SEQ ID NO: 4563 - RNA, 20 nt, synthetic construct
  source 1..20: mol_type = other RNA
ctggcgctgggcaactgcgc

SEQ ID NO: 4564 - RNA, 20 nt, synthetic construct
  source 1..20: mol_type = other RNA
ctggcgtccaccagacagcg

SEQ ID NO: 4565 - RNA, 20 nt, synthetic construct
  source 1..20: mol_type = other RNA
ctggcttgtgtcgctggcgt

SEQ ID NO: 4566 - RNA, 20 nt, synthetic construct
  source 1..20: mol_type = other RNA
ctgggcaactgcgcgctgca

SEQ ID NO: 4567 - RNA, 20 nt, synthetic construct
  source 1..20: mol_type = other RNA
ctgggcgtgatcctgaacct

SEQ ID NO: 4568 - RNA, 20 nt, synthetic construct
  source 1..20: mol_type = other RNA
ctggtggacgccagcgacac

SEQ ID NO: 4569 - RNA, 20 nt, synthetic construct
  source 1..20: mol_type = other RNA
ctggtggcggccggcggcct

SEQ ID NO: 4570 - RNA, 20 nt, synthetic construct
  source 1..20: mol_type = other RNA
ctgtattggtgccgccgcac

SEQ ID NO: 4571 - RNA, 20 nt, synthetic construct
  source 1..20: mol_type = other RNA
ctgtctggtggacgccagcg

SEQ ID NO: 4572 - RNA, 20 nt, synthetic construct
  source 1..20: mol_type = other RNA
cttcccgctcgccttctcca

SEQ ID NO: 4573 - RNA, 20 nt, synthetic construct
  source 1..20: mol_type = other RNA
cttcgccaggttcaggatca

SEQ ID NO: 4574 - RNA, 20 nt, synthetic construct
  source 1..20: mol_type = other RNA
cttcgcccgctgtctggtgg

SEQ ID NO: 4575 - RNA, 20 nt, synthetic construct
  source 1..20: mol_type = other RNA
cttcggctgcacgcctgcct

SEQ ID NO: 4576 - RNA, 20 nt, synthetic construct
  source 1..20: mol_type = other RNA
cttctccaaggaggacgagc

SEQ ID NO: 4577 - RNA, 20 nt, synthetic construct
  source 1..20: mol_type = other RNA
cttctctaccatgcgtcgct

SEQ ID NO: 4578 - RNA, 20 nt, synthetic construct
  source 1..20: mol_type = other RNA
cttgaacatgtgctccaaga

SEQ ID NO: 4579 - RNA, 20 nt, synthetic construct
  source 1..20: mol_type = other RNA
cttgatggcagcctcggcgc

SEQ ID NO: 4580 - RNA, 20 nt, synthetic construct
  source 1..20: mol_type = other RNA
cttgcaggctcttgatggca

SEQ ID NO: 4581 - RNA, 20 nt, synthetic construct
  source 1..20: mol_type = other RNA
cttgccttgcaggctcttga

SEQ ID NO: 4582 - RNA, 20 nt, synthetic construct
  source 1..20: mol_type = other RNA
cttggagaaggcgagcggga

SEQ ID NO: 4583 - RNA, 20 nt, synthetic construct
  source 1..20: mol_type = other RNA
cttggagcacatgttcaagc

SEQ ID NO: 4584 - RNA, 20 nt, synthetic construct
  source 1..20: mol_type = other RNA
cttggaggcgcagtgcatcg

SEQ ID NO: 4585 - RNA, 20 nt, synthetic construct
  source 1..20: mol_type = other RNA
cttggtcttgccttgcaggc

SEQ ID NO: 4586 - RNA, 20 nt, synthetic construct
  source 1..20: mol_type = other RNA
cttgtggcctcgctggaccc

SEQ ID NO: 4587 - RNA, 20 nt, synthetic construct
  source 1..20: mol_type = other RNA
cttgtgtcgctggcgtccac

SEQ ID NO: 4588 - RNA, 20 nt, synthetic construct
  source 1..20: mol_type = other RNA
cttgttagtcgccaacaccg

SEQ ID NO: 4589 - RNA, 20 nt, synthetic construct
  source 1..20: mol_type = other RNA
ctttctacctctgcgccgag

SEQ ID NO: 4590 - RNA, 20 nt, synthetic construct
  source 1..20: mol_type = other RNA
gaaagccccgatgcactgcg

SEQ ID NO: 4591 - RNA, 20 nt, synthetic construct
  source 1..20: mol_type = other RNA
gaacatgtgctccaagatgc

SEQ ID NO: 4592 - RNA, 20 nt, synthetic construct
  source 1..20: mol_type = other RNA
gaacccgtagagctggcgcg

SEQ ID NO: 4593 - RNA, 20 nt, synthetic construct
  source 1..20: mol_type = other RNA
gaacctggcgaaggaacgcg

SEQ ID NO: 4594 - RNA, 20 nt, synthetic construct
  source 1..20: mol_type = other RNA
gaacgcgaacccgtagagct

SEQ ID NO: 4595 - RNA, 20 nt, synthetic construct
  source 1..20: mol_type = other RNA
gaagagccactcggctgcgc

SEQ ID NO: 4596 - RNA, 20 nt, synthetic construct
  source 1..20: mol_type = other RNA
gaagcagctcgtcctccttg

SEQ ID NO: 4597 - RNA, 20 nt, synthetic construct
  source 1..20: mol_type = other RNA
gaagcgcgcagccgagtggc

SEQ ID NO: 4598 - RNA, 20 nt, synthetic construct
  source 1..20: mol_type = other RNA
gaagcggccagggtccagcg

SEQ ID NO: 4599 - RNA, 20 nt, synthetic construct
  source 1..20: mol_type = other RNA
gaaggaacgcgaacccgtag

SEQ ID NO: 4600 - RNA, 20 nt, synthetic construct
  source 1..20: mol_type = other RNA
gaaggcgagcgggaagagcc

SEQ ID NO: 4601 - RNA, 20 nt, synthetic construct
  source 1..20: mol_type = other RNA
gaatgcttgaacatgtgctc

SEQ ID NO: 4602 - RNA, 20 nt, synthetic construct
  source 1..20: mol_type = other RNA
gacacaagccagggccgcgg

SEQ ID NO: 4603 - RNA, 20 nt, synthetic construct
  source 1..20: mol_type = other RNA
gacagcgggcgaagcggcca

SEQ ID NO: 4604 - RNA, 20 nt, synthetic construct
  source 1..20: mol_type = other RNA
gacatgccagaggctggtgg

SEQ ID NO: 4605 - RNA, 20 nt, synthetic construct
  source 1..20: mol_type = other RNA
gaccaaggtgggtgcagatg

SEQ ID NO: 4606 - RNA, 20 nt, synthetic construct
  source 1..20: mol_type = other RNA
gaccccgcgctgctgcgcca

SEQ ID NO: 4607 - RNA, 20 nt, synthetic construct
  source 1..20: mol_type = other RNA
gaccctggccgcttcgcccg

SEQ ID NO: 4608 - RNA, 20 nt, synthetic construct
  source 1..20: mol_type = other RNA
gaccgcgtggcgcgcattgg

SEQ ID NO: 4609 - RNA, 20 nt, synthetic construct
  source 1..20: mol_type = other RNA
gacctgcagcgcctcgtgcc

SEQ ID NO: 4610 - RNA, 20 nt, synthetic construct
  source 1..20: mol_type = other RNA
gacgacctgcagcgcctcgt

SEQ ID NO: 4611 - RNA, 20 nt, synthetic construct
  source 1..20: mol_type = other RNA
gacgagctgcttcggctgca

SEQ ID NO: 4612 - RNA, 20 nt, synthetic construct
  source 1..20: mol_type = other RNA
gacgcatggtagagaagcgc

SEQ ID NO: 4613 - RNA, 20 nt, synthetic construct
  source 1..20: mol_type = other RNA
gacgccagcgacacaagcca

SEQ ID NO: 4614 - RNA, 20 nt, synthetic construct
  source 1..20: mol_type = other RNA
gacgcggtgctgtattggtg

SEQ ID NO: 4615 - RNA, 20 nt, synthetic construct
  source 1..20: mol_type = other RNA
gactaacaaggaggtggagc

SEQ ID NO: 4616 - RNA, 20 nt, synthetic construct
  source 1..20: mol_type = other RNA
gactctaaccgcttggaggc

SEQ ID NO: 4617 - RNA, 20 nt, synthetic construct
  source 1..20: mol_type = other RNA
gagaagcgcgcagccgagtg

SEQ ID NO: 4618 - RNA, 20 nt, synthetic construct
  source 1..20: mol_type = other RNA
gagaaggcgagcgggaagag

SEQ ID NO: 4619 - RNA, 20 nt, synthetic construct
  source 1..20: mol_type = other RNA
gagacatgccagaggctggt

SEQ ID NO: 4620 - RNA, 20 nt, synthetic construct
  source 1..20: mol_type = other RNA
gagcaacggcacgaggcgct

SEQ ID NO: 4621 - RNA, 20 nt, synthetic construct
  source 1..20: mol_type = other RNA
gagcacatgttcaagcattc

SEQ ID NO: 4622 - RNA, 20 nt, synthetic construct
  source 1..20: mol_type = other RNA
gagccactcggctgcgcgct

SEQ ID NO: 4623 - RNA, 20 nt, synthetic construct
  source 1..20: mol_type = other RNA
gagccgcttgtggcctcgct

SEQ ID NO: 4624 - RNA, 20 nt, synthetic construct
  source 1..20: mol_type = other RNA
gagcctgcaaggcaagacca

SEQ ID NO: 4625 - RNA, 20 nt, synthetic construct
  source 1..20: mol_type = other RNA
gagcgccagcgtgcccgagc

SEQ ID NO: 4626 - RNA, 20 nt, synthetic construct
  source 1..20: mol_type = other RNA
gagcgcgaggtggagcgctc

SEQ ID NO: 4627 - RNA, 20 nt, synthetic construct
  source 1..20: mol_type = other RNA
gagcgctccacctcgcgctc

SEQ ID NO: 4628 - RNA, 20 nt, synthetic construct
  source 1..20: mol_type = other RNA
gagcgctcgggcacgctggc

SEQ ID NO: 4629 - RNA, 20 nt, synthetic construct
  source 1..20: mol_type = other RNA
gagcgggaagagccactcgg

SEQ ID NO: 4630 - RNA, 20 nt, synthetic construct
  source 1..20: mol_type = other RNA
gagcgtggcaggcatcttgg

SEQ ID NO: 4631 - RNA, 20 nt, synthetic construct
  source 1..20: mol_type = other RNA
gagctgcttcggctgcacgc

SEQ ID NO: 4632 - RNA, 20 nt, synthetic construct
  source 1..20: mol_type = other RNA
gagctggcgcggagcgtggc

SEQ ID NO: 4633 - RNA, 20 nt, synthetic construct
  source 1..20: mol_type = other RNA
gaggacgagctgcttcggct

SEQ ID NO: 4634 - RNA, 20 nt, synthetic construct
  source 1..20: mol_type = other RNA
gaggagacatgccagaggct

SEQ ID NO: 4635 - RNA, 20 nt, synthetic construct
  source 1..20: mol_type = other RNA
gaggcaggcgtgcagccgaa

SEQ ID NO: 4636 - RNA, 20 nt, synthetic construct
  source 1..20: mol_type = other RNA
gaggccacaagcggctccac

SEQ ID NO: 4637 - RNA, 20 nt, synthetic construct
  source 1..20: mol_type = other RNA
gaggcgcagtgcatcggggc

SEQ ID NO: 4638 - RNA, 20 nt, synthetic construct
  source 1..20: mol_type = other RNA
gaggcgctgcaggtcgtcgg

SEQ ID NO: 4639 - RNA, 20 nt, synthetic construct
  source 1..20: mol_type = other RNA
gaggctgccatcaagagcct

SEQ ID NO: 4640 - RNA, 20 nt, synthetic construct
  source 1..20: mol_type = other RNA
gaggctggtggcggccggcg

SEQ ID NO: 4641 - RNA, 20 nt, synthetic construct
  source 1..20: mol_type = other RNA
gaggtagaaagccccgatgc

SEQ ID NO: 4642 - RNA, 20 nt, synthetic construct
  source 1..20: mol_type = other RNA
gaggtggagcgcgaggtgga

SEQ ID NO: 4643 - RNA, 20 nt, synthetic construct
  source 1..20: mol_type = other RNA
gaggtggagcgctcgggcac

SEQ ID NO: 4644 - RNA, 20 nt, synthetic construct
  source 1..20: mol_type = other RNA
gagtcgagcaacggcacgag

SEQ ID NO: 4645 - RNA, 20 nt, synthetic construct
  source 1..20: mol_type = other RNA
gagtggctcttcccgctcgc

SEQ ID NO: 4646 - RNA, 20 nt, synthetic construct
  source 1..20: mol_type = other RNA
gatcacgcccagcccaatgc

SEQ ID NO: 4647 - RNA, 20 nt, synthetic construct
  source 1..20: mol_type = other RNA
gatcctgaacctggcgaagg

SEQ ID NO: 4648 - RNA, 20 nt, synthetic construct
  source 1..20: mol_type = other RNA
gatgcactgcgcctccaagc

SEQ ID NO: 4649 - RNA, 20 nt, synthetic construct
  source 1..20: mol_type = other RNA
gatgcctgccacgctccgcg

SEQ ID NO: 4650 - RNA, 20 nt, synthetic construct
  source 1..20: mol_type = other RNA
gatggcagcctcggcgcaga

SEQ ID NO: 4651 - RNA, 20 nt, synthetic construct
  source 1..20: mol_type = other RNA
gcaacggcacgaggcgctgc

SEQ ID NO: 4652 - RNA, 20 nt, synthetic construct
  source 1..20: mol_type = other RNA
gcaactgcgcgctgcacggg

SEQ ID NO: 4653 - RNA, 20 nt, synthetic construct
  source 1..20: mol_type = other RNA
gcaagaccaaggtgggtgca

SEQ ID NO: 4654 - RNA, 20 nt, synthetic construct
  source 1..20: mol_type = other RNA
gcaaggcaagaccaaggtgg

SEQ ID NO: 4655 - RNA, 20 nt, synthetic construct
  source 1..20: mol_type = other RNA
gcacatgttcaagcattcgg

SEQ ID NO: 4656 - RNA, 20 nt, synthetic construct
  source 1..20: mol_type = other RNA
gcaccaatacagcaccgcgt

SEQ ID NO: 4657 - RNA, 20 nt, synthetic construct
  source 1..20: mol_type = other RNA
gcacccaccttggtcttgcc

SEQ ID NO: 4658 - RNA, 20 nt, synthetic construct
  source 1..20: mol_type = other RNA
gcaccgcctggcccccgtgc

SEQ ID NO: 4659 - RNA, 20 nt, synthetic construct
  source 1..20: mol_type = other RNA
gcaccgcgtccaggccgccg

SEQ ID NO: 4660 - RNA, 20 nt, synthetic construct
  source 1..20: mol_type = other RNA
gcacgaggcgctgcaggtcg

SEQ ID NO: 4661 - RNA, 20 nt, synthetic construct
  source 1..20: mol_type = other RNA
gcacgcctgcctcgcagtag

SEQ ID NO: 4662 - RNA, 20 nt, synthetic construct
  source 1..20: mol_type = other RNA
gcacgctggcgctcgtggag

SEQ ID NO: 4663 - RNA, 20 nt, synthetic construct
  source 1..20: mol_type = other RNA
gcacggaccccgcgctgctg

SEQ ID NO: 4664 - RNA, 20 nt, synthetic construct
  source 1..20: mol_type = other RNA
gcacgggggccaggcggtgc

SEQ ID NO: 4665 - RNA, 20 nt, synthetic construct
  source 1..20: mol_type = other RNA
gcactgcgcctccaagcggt

SEQ ID NO: 4666 - RNA, 20 nt, synthetic construct
  source 1..20: mol_type = other RNA
gcagaggtagaaagccccga

SEQ ID NO: 4667 - RNA, 20 nt, synthetic construct
  source 1..20: mol_type = other RNA
gcagcagcgcggggtccgtg

SEQ ID NO: 4668 - RNA, 20 nt, synthetic construct
  source 1..20: mol_type = other RNA
gcagccgaagcagctcgtcc

SEQ ID NO: 4669 - RNA, 20 nt, synthetic construct
  source 1..20: mol_type = other RNA
gcagccgagtggctcttccc

SEQ ID NO: 4670 - RNA, 20 nt, synthetic construct
  source 1..20: mol_type = other RNA
gcagcctcggcgcagaggta

SEQ ID NO: 4671 - RNA, 20 nt, synthetic construct
  source 1..20: mol_type = other RNA
gcagcgacgcatggtagaga

SEQ ID NO: 4672 - RNA, 20 nt, synthetic construct
  source 1..20: mol_type = other RNA
gcagcgcctcgtgccgttgc

SEQ ID NO: 4673 - RNA, 20 nt, synthetic construct
  source 1..20: mol_type = other RNA
gcagcgcgcagttgcccagc

SEQ ID NO: 4674 - RNA, 20 nt, synthetic construct
  source 1..20: mol_type = other RNA
gcagcgcggggtccgtgcgg

SEQ ID NO: 4675 - RNA, 20 nt, synthetic construct
  source 1..20: mol_type = other RNA
gcagctcgtcctccttggag

SEQ ID NO: 4676 - RNA, 20 nt, synthetic construct
  source 1..20: mol_type = other RNA
gcaggcatcttggagcacat

SEQ ID NO: 4677 - RNA, 20 nt, synthetic construct
  source 1..20: mol_type = other RNA
gcaggcgtgcagccgaagca

SEQ ID NO: 4678 - RNA, 20 nt, synthetic construct
  source 1..20: mol_type = other RNA
gcaggctcttgatggcagcc

SEQ ID NO: 4679 - RNA, 20 nt, synthetic construct
  source 1..20: mol_type = other RNA
gcaggtcgtcgggcccgcgg

SEQ ID NO: 4680 - RNA, 20 nt, synthetic construct
  source 1..20: mol_type = other RNA
gcagtagcggtgttggcgac

SEQ ID NO: 4681 - RNA, 20 nt, synthetic construct
  source 1..20: mol_type = other RNA
gcagtgcatcggggctttct

SEQ ID NO: 4682 - RNA, 20 nt, synthetic construct
  source 1..20: mol_type = other RNA
gcagtggcgcagcagcgcgg

SEQ ID NO: 4683 - RNA, 20 nt, synthetic construct
  source 1..20: mol_type = other RNA
gcagttgcccagcgccagcg

SEQ ID NO: 4684 - RNA, 20 nt, synthetic construct
  source 1..20: mol_type = other RNA
gcatcggggctttctacctc

SEQ ID NO: 4685 - RNA, 20 nt, synthetic construct
  source 1..20: mol_type = other RNA
gcatcttggagcacatgttc

SEQ ID NO: 4686 - RNA, 20 nt, synthetic construct
  source 1..20: mol_type = other RNA
gcatggtagagaagcgcgca

SEQ ID NO: 4687 - RNA, 20 nt, synthetic construct
  source 1..20: mol_type = other RNA
gcatgtctcctccgaatgct

SEQ ID NO: 4688 - RNA, 20 nt, synthetic construct
  source 1..20: mol_type = other RNA
gcattcggaggagacatgcc

SEQ ID NO: 4689 - RNA, 20 nt, synthetic construct
  source 1..20: mol_type = other RNA
gcattgggctgggcgtgatc

SEQ ID NO: 4690 - RNA, 20 nt, synthetic construct
  source 1..20: mol_type = other RNA
gccaacaccgctactgcgag

SEQ ID NO: 4691 - RNA, 20 nt, synthetic construct
  source 1..20: mol_type = other RNA
gccacaagcggctccacgag

SEQ ID NO: 4692 - RNA, 20 nt, synthetic construct
  source 1..20: mol_type = other RNA
gccaccagcctctggcatgt

SEQ ID NO: 4693 - RNA, 20 nt, synthetic construct
  source 1..20: mol_type = other RNA
gccacgctccgcgccagctc

SEQ ID NO: 4694 - RNA, 20 nt, synthetic construct
  source 1..20: mol_type = other RNA
gccactcggctgcgcgcttc

SEQ ID NO: 4695 - RNA, 20 nt, synthetic construct
  source 1..20: mol_type = other RNA
gccactgcgcgctggcgctg

SEQ ID NO: 4696 - RNA, 20 nt, synthetic construct
  source 1..20: mol_type = other RNA
gccagaggctggtggcggcc

SEQ ID NO: 4697 - RNA, 20 nt, synthetic construct
  source 1..20: mol_type = other RNA
gccagcgacacaagccaggg

SEQ ID NO: 4698 - RNA, 20 nt, synthetic construct
  source 1..20: mol_type = other RNA
gccagcgcgcagtggcgcag

SEQ ID NO: 4699 - RNA, 20 nt, synthetic construct
  source 1..20: mol_type = other RNA
gccagcgtgcccgagcgctc

SEQ ID NO: 4700 - RNA, 20 nt, synthetic construct
  source 1..20: mol_type = other RNA
gccagctctacgggttcgcg

SEQ ID NO: 4701 - RNA, 20 nt, synthetic construct
  source 1..20: mol_type = other RNA
gccaggcggtgcagcgacgc

SEQ ID NO: 4702 - RNA, 20 nt, synthetic construct
  source 1..20: mol_type = other RNA
gccagggccgcgggcccgac

SEQ ID NO: 4703 - RNA, 20 nt, synthetic construct
  source 1..20: mol_type = other RNA
gccagggtccagcgaggcca

SEQ ID NO: 4704 - RNA, 20 nt, synthetic construct
  source 1..20: mol_type = other RNA
gccaggttcaggatcacgcc

SEQ ID NO: 4705 - RNA, 20 nt, synthetic construct
  source 1..20: mol_type = other RNA
gccatcaagagcctgcaagg

SEQ ID NO: 4706 - RNA, 20 nt, synthetic construct
  source 1..20: mol_type = other RNA
gcccagcccaatgcgcgcca

SEQ ID NO: 4707 - RNA, 20 nt, synthetic construct
  source 1..20: mol_type = other RNA
gcccagcgccagcgcgcagt

SEQ ID NO: 4708 - RNA, 20 nt, synthetic construct
  source 1..20: mol_type = other RNA
gcccccgtgcagcgcgcagt

SEQ ID NO: 4709 - RNA, 20 nt, synthetic construct
  source 1..20: mol_type = other RNA
gccccgatgcactgcgcctc

SEQ ID NO: 4710 - RNA, 20 nt, synthetic construct
  source 1..20: mol_type = other RNA
gcccgacgacctgcagcgcc

SEQ ID NO: 4711 - RNA, 20 nt, synthetic construct
  source 1..20: mol_type = other RNA
gcccgagcgctccacctcgc

SEQ ID NO: 4712 - RNA, 20 nt, synthetic construct
  source 1..20: mol_type = other RNA
gcccgcggccctggcttgtg

SEQ ID NO: 4713 - RNA, 20 nt, synthetic construct
  source 1..20: mol_type = other RNA
gcccgctgtctggtggacgc

SEQ ID NO: 4714 - RNA, 20 nt, synthetic construct
  source 1..20: mol_type = other RNA
gccctggcttgtgtcgctgg

SEQ ID NO: 4715 - RNA, 20 nt, synthetic construct
  source 1..20: mol_type = other RNA
gccgaagcagctcgtcctcc

SEQ ID NO: 4716 - RNA, 20 nt, synthetic construct
  source 1..20: mol_type = other RNA
gccgaggctgccatcaagag

SEQ ID NO: 4717 - RNA, 20 nt, synthetic construct
  source 1..20: mol_type = other RNA
gccgagtggctcttcccgct

SEQ ID NO: 4718 - RNA, 20 nt, synthetic construct
  source 1..20: mol_type = other RNA
gccgcacggaccccgcgctg

SEQ ID NO: 4719 - RNA, 20 nt, synthetic construct
  source 1..20: mol_type = other RNA
gccgccaccagcctctggca

SEQ ID NO: 4720 - RNA, 20 nt, synthetic construct
  source 1..20: mol_type = other RNA
gccgccgcacggaccccgcg

SEQ ID NO: 4721 - RNA, 20 nt, synthetic construct
  source 1..20: mol_type = other RNA
gccgccggccgccaccagcc

SEQ ID NO: 4722 - RNA, 20 nt, synthetic construct
  source 1..20: mol_type = other RNA
gccgcgggcccgacgacctg

SEQ ID NO: 4723 - RNA, 20 nt, synthetic construct
  source 1..20: mol_type = other RNA
gccgcttcgcccgctgtctg

SEQ ID NO: 4724 - RNA, 20 nt, synthetic construct
  source 1..20: mol_type = other RNA
gccgcttgtggcctcgctgg

SEQ ID NO: 4725 - RNA, 20 nt, synthetic construct
  source 1..20: mol_type = other RNA
gccggccgccaccagcctct

SEQ ID NO: 4726 - RNA, 20 nt, synthetic construct
  source 1..20: mol_type = other RNA
gccggcggcctggacgcggt

SEQ ID NO: 4727 - RNA, 20 nt, synthetic construct
  source 1..20: mol_type = other RNA
gccgttgctcgactctaacc

SEQ ID NO: 4728 - RNA, 20 nt, synthetic construct
  source 1..20: mol_type = other RNA
gcctccaagcggttagagtc

SEQ ID NO: 4729 - RNA, 20 nt, synthetic construct
  source 1..20: mol_type = other RNA
gcctcgcagtagcggtgttg

SEQ ID NO: 4730 - RNA, 20 nt, synthetic construct
  source 1..20: mol_type = other RNA
gcctcgctggaccctggccg

SEQ ID NO: 4731 - RNA, 20 nt, synthetic construct
  source 1..20: mol_type = other RNA
gcctcggcgcagaggtagaa

SEQ ID NO: 4732 - RNA, 20 nt, synthetic construct
  source 1..20: mol_type = other RNA
gcctcgtgccgttgctcgac

SEQ ID NO: 4733 - RNA, 20 nt, synthetic construct
  source 1..20: mol_type = other RNA
gcctctggcatgtctcctcc

SEQ ID NO: 4734 - RNA, 20 nt, synthetic construct
  source 1..20: mol_type = other RNA
gcctgcaaggcaagaccaag

SEQ ID NO: 4735 - RNA, 20 nt, synthetic construct
  source 1..20: mol_type = other RNA
gcctgccacgctccgcgcca

SEQ ID NO: 4736 - RNA, 20 nt, synthetic construct
  source 1..20: mol_type = other RNA
gcctgcctcgcagtagcggt

SEQ ID NO: 4737 - RNA, 20 nt, synthetic construct
  source 1..20: mol_type = other RNA
gcctggacgcggtgctgtat

SEQ ID NO: 4738 - RNA, 20 nt, synthetic construct
  source 1..20: mol_type = other RNA
gcctggcccccgtgcagcgc

SEQ ID NO: 4739 - RNA, 20 nt, synthetic construct
  source 1..20: mol_type = other RNA
gccttctccaaggaggacga

SEQ ID NO: 4740 - RNA, 20 nt, synthetic construct
  source 1..20: mol_type = other RNA
gccttgcaggctcttgatgg

SEQ ID NO: 4741 - RNA, 20 nt, synthetic construct
  source 1..20: mol_type = other RNA
gcgaacccgtagagctggcg

SEQ ID NO: 4742 - RNA, 20 nt, synthetic construct
  source 1..20: mol_type = other RNA
gcgaagcggccagggtccag

SEQ ID NO: 4743 - RNA, 20 nt, synthetic construct
  source 1..20: mol_type = other RNA
gcgaaggaacgcgaacccgt

SEQ ID NO: 4744 - RNA, 20 nt, synthetic construct
  source 1..20: mol_type = other RNA
gcgacacaagccagggccgc

SEQ ID NO: 4745 - RNA, 20 nt, synthetic construct
  source 1..20: mol_type = other RNA
gcgacgcatggtagagaagc

SEQ ID NO: 4746 - RNA, 20 nt, synthetic construct
  source 1..20: mol_type = other RNA
gcgactaacaaggaggtgga

SEQ ID NO: 4747 - RNA, 20 nt, synthetic construct
  source 1..20: mol_type = other RNA
gcgagcgggaagagccactc

SEQ ID NO: 4748 - RNA, 20 nt, synthetic construct
  source 1..20: mol_type = other RNA
gcgaggcaggcgtgcagccg

SEQ ID NO: 4749 - RNA, 20 nt, synthetic construct
  source 1..20: mol_type = other RNA
gcgaggccacaagcggctcc

SEQ ID NO: 4750 - RNA, 20 nt, synthetic construct
  source 1..20: mol_type = other RNA
gcgaggtggagcgctcgggc

SEQ ID NO: 4751 - RNA, 20 nt, synthetic construct
  source 1..20: mol_type = other RNA
gcgcagaggtagaaagcccc

SEQ ID NO: 4752 - RNA, 20 nt, synthetic construct
  source 1..20: mol_type = other RNA
gcgcagcagcgcggggtccg

SEQ ID NO: 4753 - RNA, 20 nt, synthetic construct
  source 1..20: mol_type = other RNA
gcgcagccgagtggctcttc

SEQ ID NO: 4754 - RNA, 20 nt, synthetic construct
  source 1..20: mol_type = other RNA
gcgcagtgcatcggggcttt

SEQ ID NO: 4755 - RNA, 20 nt, synthetic construct
  source 1..20: mol_type = other RNA
gcgcagtggcgcagcagcgc

SEQ ID NO: 4756 - RNA, 20 nt, synthetic construct
  source 1..20: mol_type = other RNA
gcgcagttgcccagcgccag

SEQ ID NO: 4757 - RNA, 20 nt, synthetic construct
  source 1..20: mol_type = other RNA
gcgcattgggctgggcgtga

SEQ ID NO: 4758 - RNA, 20 nt, synthetic construct
  source 1..20: mol_type = other RNA
gcgccactgcgcgctggcgc

SEQ ID NO: 4759 - RNA, 20 nt, synthetic construct
  source 1..20: mol_type = other RNA
gcgccagcgcgcagtggcgc

SEQ ID NO: 4760 - RNA, 20 nt, synthetic construct
  source 1..20: mol_type = other RNA
gcgccagcgtgcccgagcgc

SEQ ID NO: 4761 - RNA, 20 nt, synthetic construct
  source 1..20: mol_type = other RNA
gcgccagctctacgggttcg

SEQ ID NO: 4762 - RNA, 20 nt, synthetic construct
  source 1..20: mol_type = other RNA
gcgccgaggctgccatcaag

SEQ ID NO: 4763 - RNA, 20 nt, synthetic construct
  source 1..20: mol_type = other RNA
gcgcctccaagcggttagag

SEQ ID NO: 4764 - RNA, 20 nt, synthetic construct
  source 1..20: mol_type = other RNA
gcgcctcgtgccgttgctcg

SEQ ID NO: 4765 - RNA, 20 nt, synthetic construct
  source 1..20: mol_type = other RNA
gcgcgaggtggagcgctcgg

SEQ ID NO: 4766 - RNA, 20 nt, synthetic construct
  source 1..20: mol_type = other RNA
gcgcgcagccgagtggctct

SEQ ID NO: 4767 - RNA, 20 nt, synthetic construct
  source 1..20: mol_type = other RNA
gcgcgcagtggcgcagcagc

SEQ ID NO: 4768 - RNA, 20 nt, synthetic construct
  source 1..20: mol_type = other RNA
gcgcgcagttgcccagcgcc

SEQ ID NO: 4769 - RNA, 20 nt, synthetic construct
  source 1..20: mol_type = other RNA
gcgcgcattgggctgggcgt

SEQ ID NO: 4770 - RNA, 20 nt, synthetic construct
  source 1..20: mol_type = other RNA
gcgcgctgcacgggggccag

SEQ ID NO: 4771 - RNA, 20 nt, synthetic construct
  source 1..20: mol_type = other RNA
gcgcgctggcgctgggcaac

SEQ ID NO: 4772 - RNA, 20 nt, synthetic construct
  source 1..20: mol_type = other RNA
gcgcgcttctctaccatgcg

SEQ ID NO: 4773 - RNA, 20 nt, synthetic construct
  source 1..20: mol_type = other RNA
gcgcggagcgtggcaggcat

SEQ ID NO: 4774 - RNA, 20 nt, synthetic construct
  source 1..20: mol_type = other RNA
gcgcggggtccgtgcggcgg

SEQ ID NO: 4775 - RNA, 20 nt, synthetic construct
  source 1..20: mol_type = other RNA
gcgctccacctccttgttag

SEQ ID NO: 4776 - RNA, 20 nt, synthetic construct
  source 1..20: mol_type = other RNA
gcgctccacctcgcgctcca

SEQ ID NO: 4777 - RNA, 20 nt, synthetic construct
  source 1..20: mol_type = other RNA
gcgctcgggcacgctggcgc

SEQ ID NO: 4778 - RNA, 20 nt, synthetic construct
  source 1..20: mol_type = other RNA
gcgctcgtggagccgcttgt

SEQ ID NO: 4779 - RNA, 20 nt, synthetic construct
  source 1..20: mol_type = other RNA
gcgctgcacgggggccaggc

SEQ ID NO: 4780 - RNA, 20 nt, synthetic construct
  source 1..20: mol_type = other RNA
gcgctgcaggtcgtcgggcc

SEQ ID NO: 4781 - RNA, 20 nt, synthetic construct
  source 1..20: mol_type = other RNA
gcgctgctgcgccactgcgc

SEQ ID NO: 4782 - RNA, 20 nt, synthetic construct
  source 1..20: mol_type = other RNA
gcgctggcgctgggcaactg

SEQ ID NO: 4783 - RNA, 20 nt, synthetic construct
  source 1..20: mol_type = other RNA
gcgctgggcaactgcgcgct

SEQ ID NO: 4784 - RNA, 20 nt, synthetic construct
  source 1..20: mol_type = other RNA
gcgcttctctaccatgcgtc

SEQ ID NO: 4785 - RNA, 20 nt, synthetic construct
  source 1..20: mol_type = other RNA
gcggagcgtggcaggcatct

SEQ ID NO: 4786 - RNA, 20 nt, synthetic construct
  source 1..20: mol_type = other RNA
gcggcaccaatacagcaccg

SEQ ID NO: 4787 - RNA, 20 nt, synthetic construct
  source 1..20: mol_type = other RNA
gcggccagggtccagcgagg

SEQ ID NO: 4788 - RNA, 20 nt, synthetic construct
  source 1..20: mol_type = other RNA
gcggccctggcttgtgtcgc

SEQ ID NO: 4789 - RNA, 20 nt, synthetic construct
  source 1..20: mol_type = other RNA
gcggccggcggcctggacgc

SEQ ID NO: 4790 - RNA, 20 nt, synthetic construct
  source 1..20: mol_type = other RNA
gcggcctggacgcggtgctg

SEQ ID NO: 4791 - RNA, 20 nt, synthetic construct
  source 1..20: mol_type = other RNA
gcggcggcaccaatacagca

SEQ ID NO: 4792 - RNA, 20 nt, synthetic construct
  source 1..20: mol_type = other RNA
gcggctccacgagcgccagc

SEQ ID NO: 4793 - RNA, 20 nt, synthetic construct
  source 1..20: mol_type = other RNA
gcgggaagagccactcggct

SEQ ID NO: 4794 - RNA, 20 nt, synthetic construct
  source 1..20: mol_type = other RNA
gcgggcccgacgacctgcag

SEQ ID NO: 4795 - RNA, 20 nt, synthetic construct
  source 1..20: mol_type = other RNA
gcgggcgaagcggccagggt

SEQ ID NO: 4796 - RNA, 20 nt, synthetic construct
  source 1..20: mol_type = other RNA
gcggggtccgtgcggcggca

SEQ ID NO: 4797 - RNA, 20 nt, synthetic construct
  source 1..20: mol_type = other RNA
gcggtgcagcgacgcatggt

SEQ ID NO: 4798 - RNA, 20 nt, synthetic construct
  source 1..20: mol_type = other RNA
gcggtgctgtattggtgccg

SEQ ID NO: 4799 - RNA, 20 nt, synthetic construct
  source 1..20: mol_type = other RNA
gcggtgttggcgactaacaa

SEQ ID NO: 4800 - RNA, 20 nt, synthetic construct
  source 1..20: mol_type = other RNA
gcggttagagtcgagcaacg

SEQ ID NO: 4801 - RNA, 20 nt, synthetic construct
  source 1..20: mol_type = other RNA
gcgtccaccagacagcgggc

SEQ ID NO: 4802 - RNA, 20 nt, synthetic construct
  source 1..20: mol_type = other RNA
gcgtccaggccgccggccgc

SEQ ID NO: 4803 - RNA, 20 nt, synthetic construct
  source 1..20: mol_type = other RNA
gcgtcgctgcaccgcctggc

SEQ ID NO: 4804 - RNA, 20 nt, synthetic construct
  source 1..20: mol_type = other RNA
gcgtgatcctgaacctggcg

SEQ ID NO: 4805 - RNA, 20 nt, synthetic construct
  source 1..20: mol_type = other RNA
gcgtgcagccgaagcagctc

SEQ ID NO: 4806 - RNA, 20 nt, synthetic construct
  source 1..20: mol_type = other RNA
gcgtgcccgagcgctccacc

SEQ ID NO: 4807 - RNA, 20 nt, synthetic construct
  source 1..20: mol_type = other RNA
gcgtggcaggcatcttggag

SEQ ID NO: 4808 - RNA, 20 nt, synthetic construct
  source 1..20: mol_type = other RNA
gcgtggcgcgcattgggctg

SEQ ID NO: 4809 - RNA, 20 nt, synthetic construct
  source 1..20: mol_type = other RNA
gcgttccttcgccaggttca

SEQ ID NO: 4810 - RNA, 20 nt, synthetic construct
  source 1..20: mol_type = other RNA
gctactgcgaggcaggcgtg

SEQ ID NO: 4811 - RNA, 20 nt, synthetic construct
  source 1..20: mol_type = other RNA
gctccaagatgcctgccacg

SEQ ID NO: 4812 - RNA, 20 nt, synthetic construct
  source 1..20: mol_type = other RNA
gctccacctccttgttagtc

SEQ ID NO: 4813 - RNA, 20 nt, synthetic construct
  source 1..20: mol_type = other RNA
gctccacctcgcgctccacc

SEQ ID NO: 4814 - RNA, 20 nt, synthetic construct
  source 1..20: mol_type = other RNA
gctccacgagcgccagcgtg

SEQ ID NO: 4815 - RNA, 20 nt, synthetic construct
  source 1..20: mol_type = other RNA
gctccgcgccagctctacgg

SEQ ID NO: 4816 - RNA, 20 nt, synthetic construct
  source 1..20: mol_type = other RNA
gctcgactctaaccgcttgg

SEQ ID NO: 4817 - RNA, 20 nt, synthetic construct
  source 1..20: mol_type = other RNA
gctcgccttctccaaggagg

SEQ ID NO: 4818 - RNA, 20 nt, synthetic construct
  source 1..20: mol_type = other RNA
gctcgggcacgctggcgctc

SEQ ID NO: 4819 - RNA, 20 nt, synthetic construct
  source 1..20: mol_type = other RNA
gctcgtcctccttggagaag

SEQ ID NO: 4820 - RNA, 20 nt, synthetic construct
  source 1..20: mol_type = other RNA
gctcgtggagccgcttgtgg

SEQ ID NO: 4821 - RNA, 20 nt, synthetic construct
  source 1..20: mol_type = other RNA
gctctacgggttcgcgttcc

SEQ ID NO: 4822 - RNA, 20 nt, synthetic construct
  source 1..20: mol_type = other RNA
gctcttcccgctcgccttct

SEQ ID NO: 4823 - RNA, 20 nt, synthetic construct
  source 1..20: mol_type = other RNA
gctcttgatggcagcctcgg

SEQ ID NO: 4824 - RNA, 20 nt, synthetic construct
  source 1..20: mol_type = other RNA
gctgcaccgcctggcccccg

SEQ ID NO: 4825 - RNA, 20 nt, synthetic construct
  source 1..20: mol_type = other RNA
gctgcacgcctgcctcgcag

SEQ ID NO: 4826 - RNA, 20 nt, synthetic construct
  source 1..20: mol_type = other RNA
gctgcacgggggccaggcgg

SEQ ID NO: 4827 - RNA, 20 nt, synthetic construct
  source 1..20: mol_type = other RNA
gctgcaggtcgtcgggcccg

SEQ ID NO: 4828 - RNA, 20 nt, synthetic construct
  source 1..20: mol_type = other RNA
gctgccatcaagagcctgca

SEQ ID NO: 4829 - RNA, 20 nt, synthetic construct
  source 1..20: mol_type = other RNA
gctgcgccactgcgcgctgg

SEQ ID NO: 4830 - RNA, 20 nt, synthetic construct
  source 1..20: mol_type = other RNA
gctgcgcgcttctctaccat

SEQ ID NO: 4831 - RNA, 20 nt, synthetic construct
  source 1..20: mol_type = other RNA
gctgctgcgccactgcgcgc

SEQ ID NO: 4832 - RNA, 20 nt, synthetic construct
  source 1..20: mol_type = other RNA
gctgcttcggctgcacgcct

SEQ ID NO: 4833 - RNA, 20 nt, synthetic construct
  source 1..20: mol_type = other RNA
gctggaccctggccgcttcg

SEQ ID NO: 4834 - RNA, 20 nt, synthetic construct
  source 1..20: mol_type = other RNA
gctggcgcggagcgtggcag

SEQ ID NO: 4835 - RNA, 20 nt, synthetic construct
  source 1..20: mol_type = other RNA
gctggcgctcgtggagccgc

SEQ ID NO: 4836 - RNA, 20 nt, synthetic construct
  source 1..20: mol_type = other RNA
gctggcgctgggcaactgcg

SEQ ID NO: 4837 - RNA, 20 nt, synthetic construct
  source 1..20: mol_type = other RNA
gctggcgtccaccagacagc

SEQ ID NO: 4838 - RNA, 20 nt, synthetic construct
  source 1..20: mol_type = other RNA
gctgggcaactgcgcgctgc

SEQ ID NO: 4839 - RNA, 20 nt, synthetic construct
  source 1..20: mol_type = other RNA
gctgggcgtgatcctgaacc

SEQ ID NO: 4840 - RNA, 20 nt, synthetic construct
  source 1..20: mol_type = other RNA
gctggtggcggccggcggcc

SEQ ID NO: 4841 - RNA, 20 nt, synthetic construct
  source 1..20: mol_type = other RNA
gctgtattggtgccgccgca

SEQ ID NO: 4842 - RNA, 20 nt, synthetic construct
  source 1..20: mol_type = other RNA
gctgtctggtggacgccagc

SEQ ID NO: 4843 - RNA, 20 nt, synthetic construct
  source 1..20: mol_type = other RNA
gcttcgcccgctgtctggtg

SEQ ID NO: 4844 - RNA, 20 nt, synthetic construct
  source 1..20: mol_type = other RNA
gcttcggctgcacgcctgcc

SEQ ID NO: 4845 - RNA, 20 nt, synthetic construct
  source 1..20: mol_type = other RNA
gcttctctaccatgcgtcgc

SEQ ID NO: 4846 - RNA, 20 nt, synthetic construct
  source 1..20: mol_type = other RNA
gcttgaacatgtgctccaag

SEQ ID NO: 4847 - RNA, 20 nt, synthetic construct
  source 1..20: mol_type = other RNA
gcttggaggcgcagtgcatc

SEQ ID NO: 4848 - RNA, 20 nt, synthetic construct
  source 1..20: mol_type = other RNA
gcttgtggcctcgctggacc

SEQ ID NO: 4849 - RNA, 20 nt, synthetic construct
  source 1..20: mol_type = other RNA
gcttgtgtcgctggcgtcca

SEQ ID NO: 4850 - RNA, 20 nt, synthetic construct
  source 1..20: mol_type = other RNA
gctttctacctctgcgccga

SEQ ID NO: 4851 - RNA, 20 nt, synthetic construct
  source 1..20: mol_type = other RNA
ggaacgcgaacccgtagagc

SEQ ID NO: 4852 - RNA, 20 nt, synthetic construct
  source 1..20: mol_type = other RNA
ggaagagccactcggctgcg

SEQ ID NO: 4853 - RNA, 20 nt, synthetic construct
  source 1..20: mol_type = other RNA
ggaccccgcgctgctgcgcc

SEQ ID NO: 4854 - RNA, 20 nt, synthetic construct
  source 1..20: mol_type = other RNA
ggaccctggccgcttcgccc

SEQ ID NO: 4855 - RNA, 20 nt, synthetic construct
  source 1..20: mol_type = other RNA
ggacgagctgcttcggctgc

SEQ ID NO: 4856 - RNA, 20 nt, synthetic construct
  source 1..20: mol_type = other RNA
ggacgccagcgacacaagcc

SEQ ID NO: 4857 - RNA, 20 nt, synthetic construct
  source 1..20: mol_type = other RNA
ggacgcggtgctgtattggt

SEQ ID NO: 4858 - RNA, 20 nt, synthetic construct
  source 1..20: mol_type = other RNA
ggagaaggcgagcgggaaga

SEQ ID NO: 4859 - RNA, 20 nt, synthetic construct
  source 1..20: mol_type = other RNA
ggagacatgccagaggctgg

SEQ ID NO: 4860 - RNA, 20 nt, synthetic construct
  source 1..20: mol_type = other RNA
ggagcacatgttcaagcatt

SEQ ID NO: 4861 - RNA, 20 nt, synthetic construct
  source 1..20: mol_type = other RNA
ggagccgcttgtggcctcgc

SEQ ID NO: 4862 - RNA, 20 nt, synthetic construct
  source 1..20: mol_type = other RNA
ggagcgcgaggtggagcgct

SEQ ID NO: 4863 - RNA, 20 nt, synthetic construct
  source 1..20: mol_type = other RNA
ggagcgctcgggcacgctgg

SEQ ID NO: 4864 - RNA, 20 nt, synthetic construct
  source 1..20: mol_type = other RNA
ggagcgtggcaggcatcttg

SEQ ID NO: 4865 - RNA, 20 nt, synthetic construct
  source 1..20: mol_type = other RNA
ggaggacgagctgcttcggc

SEQ ID NO: 4866 - RNA, 20 nt, synthetic construct
  source 1..20: mol_type = other RNA
ggaggagacatgccagaggc

SEQ ID NO: 4867 - RNA, 20 nt, synthetic construct
  source 1..20: mol_type = other RNA
ggaggcgcagtgcatcgggg

SEQ ID NO: 4868 - RNA, 20 nt, synthetic construct
  source 1..20: mol_type = other RNA
ggaggtggagcgcgaggtgg

SEQ ID NO: 4869 - RNA, 20 nt, synthetic construct
  source 1..20: mol_type = other RNA
ggatcacgcccagcccaatg

SEQ ID NO: 4870 - RNA, 20 nt, synthetic construct
  source 1..20: mol_type = other RNA
ggcaactgcgcgctgcacgg

SEQ ID NO: 4871 - RNA, 20 nt, synthetic construct
  source 1..20: mol_type = other RNA
ggcaagaccaaggtgggtgc

SEQ ID NO: 4872 - RNA, 20 nt, synthetic construct
  source 1..20: mol_type = other RNA
ggcaccaatacagcaccgcg

SEQ ID NO: 4873 - RNA, 20 nt, synthetic construct
  source 1..20: mol_type = other RNA
ggcacgaggcgctgcaggtc

SEQ ID NO: 4874 - RNA, 20 nt, synthetic construct
  source 1..20: mol_type = other RNA
ggcacgctggcgctcgtgga

SEQ ID NO: 4875 - RNA, 20 nt, synthetic construct
  source 1..20: mol_type = other RNA
ggcagcctcggcgcagaggt

SEQ ID NO: 4876 - RNA, 20 nt, synthetic construct
  source 1..20: mol_type = other RNA
ggcaggcatcttggagcaca

SEQ ID NO: 4877 - RNA, 20 nt, synthetic construct
  source 1..20: mol_type = other RNA
ggcaggcgtgcagccgaagc

SEQ ID NO: 4878 - RNA, 20 nt, synthetic construct
  source 1..20: mol_type = other RNA
ggcatcttggagcacatgtt

SEQ ID NO: 4879 - RNA, 20 nt, synthetic construct
  source 1..20: mol_type = other RNA
ggcatgtctcctccgaatgc

SEQ ID NO: 4880 - RNA, 20 nt, synthetic construct
  source 1..20: mol_type = other RNA
ggccacaagcggctccacga

SEQ ID NO: 4881 - RNA, 20 nt, synthetic construct
  source 1..20: mol_type = other RNA
ggccaggcggtgcagcgacg

SEQ ID NO: 4882 - RNA, 20 nt, synthetic construct
  source 1..20: mol_type = other RNA
ggccagggtccagcgaggcc

SEQ ID NO: 4883 - RNA, 20 nt, synthetic construct
  source 1..20: mol_type = other RNA
ggcccccgtgcagcgcgcag

SEQ ID NO: 4884 - RNA, 20 nt, synthetic construct
  source 1..20: mol_type = other RNA
ggcccgacgacctgcagcgc

SEQ ID NO: 4885 - RNA, 20 nt, synthetic construct
  source 1..20: mol_type = other RNA
ggcccgcggccctggcttgt

SEQ ID NO: 4886 - RNA, 20 nt, synthetic construct
  source 1..20: mol_type = other RNA
ggccctggcttgtgtcgctg

SEQ ID NO: 4887 - RNA, 20 nt, synthetic construct
  source 1..20: mol_type = other RNA
ggccgccaccagcctctggc

SEQ ID NO: 4888 - RNA, 20 nt, synthetic construct
  source 1..20: mol_type = other RNA
ggccgccggccgccaccagc

SEQ ID NO: 4889 - RNA, 20 nt, synthetic construct
  source 1..20: mol_type = other RNA
ggccgcgggcccgacgacct

SEQ ID NO: 4890 - RNA, 20 nt, synthetic construct
  source 1..20: mol_type = other RNA
ggccgcttcgcccgctgtct

SEQ ID NO: 4891 - RNA, 20 nt, synthetic construct
  source 1..20: mol_type = other RNA
ggccggcggcctggacgcgg

SEQ ID NO: 4892 - RNA, 20 nt, synthetic construct
  source 1..20: mol_type = other RNA
ggcctcgctggaccctggcc

SEQ ID NO: 4893 - RNA, 20 nt, synthetic construct
  source 1..20: mol_type = other RNA
ggcctggacgcggtgctgta

SEQ ID NO: 4894 - RNA, 20 nt, synthetic construct
  source 1..20: mol_type = other RNA
ggcgaagcggccagggtcca

SEQ ID NO: 4895 - RNA, 20 nt, synthetic construct
  source 1..20: mol_type = other RNA
ggcgaaggaacgcgaacccg

SEQ ID NO: 4896 - RNA, 20 nt, synthetic construct
  source 1..20: mol_type = other RNA
ggcgactaacaaggaggtgg

SEQ ID NO: 4897 - RNA, 20 nt, synthetic construct
  source 1..20: mol_type = other RNA
ggcgagcgggaagagccact

SEQ ID NO: 4898 - RNA, 20 nt, synthetic construct
  source 1..20: mol_type = other RNA
ggcgcagaggtagaaagccc

SEQ ID NO: 4899 - RNA, 20 nt, synthetic construct
  source 1..20: mol_type = other RNA
ggcgcagcagcgcggggtcc

SEQ ID NO: 4900 - RNA, 20 nt, synthetic construct
  source 1..20: mol_type = other RNA
ggcgcagtgcatcggggctt

SEQ ID NO: 4901 - RNA, 20 nt, synthetic construct
  source 1..20: mol_type = other RNA
ggcgcgcattgggctgggcg

SEQ ID NO: 4902 - RNA, 20 nt, synthetic construct
  source 1..20: mol_type = other RNA
ggcgcggagcgtggcaggca

SEQ ID NO: 4903 - RNA, 20 nt, synthetic construct
  source 1..20: mol_type = other RNA
ggcgctcgtggagccgcttg

SEQ ID NO: 4904 - RNA, 20 nt, synthetic construct
  source 1..20: mol_type = other RNA
ggcgctgcaggtcgtcgggc

SEQ ID NO: 4905 - RNA, 20 nt, synthetic construct
  source 1..20: mol_type = other RNA
ggcgctgggcaactgcgcgc

SEQ ID NO: 4906 - RNA, 20 nt, synthetic construct
  source 1..20: mol_type = other RNA
ggcggcaccaatacagcacc

SEQ ID NO: 4907 - RNA, 20 nt, synthetic construct
  source 1..20: mol_type = other RNA
ggcggccggcggcctggacg

SEQ ID NO: 4908 - RNA, 20 nt, synthetic construct
  source 1..20: mol_type = other RNA
ggcggcctggacgcggtgct

SEQ ID NO: 4909 - RNA, 20 nt, synthetic construct
  source 1..20: mol_type = other RNA
ggcggtgcagcgacgcatgg

SEQ ID NO: 4910 - RNA, 20 nt, synthetic construct
  source 1..20: mol_type = other RNA
ggcgtccaccagacagcggg

SEQ ID NO: 4911 - RNA, 20 nt, synthetic construct
  source 1..20: mol_type = other RNA
ggcgtgatcctgaacctggc

SEQ ID NO: 4912 - RNA, 20 nt, synthetic construct
  source 1..20: mol_type = other RNA
ggcgtgcagccgaagcagct

SEQ ID NO: 4913 - RNA, 20 nt, synthetic construct
  source 1..20: mol_type = other RNA
ggctccacgagcgccagcgt

SEQ ID NO: 4914 - RNA, 20 nt, synthetic construct
  source 1..20: mol_type = other RNA
ggctcttcccgctcgccttc

SEQ ID NO: 4915 - RNA, 20 nt, synthetic construct
  source 1..20: mol_type = other RNA
ggctcttgatggcagcctcg

SEQ ID NO: 4916 - RNA, 20 nt, synthetic construct
  source 1..20: mol_type = other RNA
ggctgcacgcctgcctcgca

SEQ ID NO: 4917 - RNA, 20 nt, synthetic construct
  source 1..20: mol_type = other RNA
ggctgccatcaagagcctgc

SEQ ID NO: 4918 - RNA, 20 nt, synthetic construct
  source 1..20: mol_type = other RNA
ggctgcgcgcttctctacca

SEQ ID NO: 4919 - RNA, 20 nt, synthetic construct
  source 1..20: mol_type = other RNA
ggctgggcgtgatcctgaac

SEQ ID NO: 4920 - RNA, 20 nt, synthetic construct
  source 1..20: mol_type = other RNA
ggctggtggcggccggcggc

SEQ ID NO: 4921 - RNA, 20 nt, synthetic construct
  source 1..20: mol_type = other RNA
ggcttgtgtcgctggcgtcc

SEQ ID NO: 4922 - RNA, 20 nt, synthetic construct
  source 1..20: mol_type = other RNA
ggctttctacctctgcgccg

SEQ ID NO: 4923 - RNA, 20 nt, synthetic construct
  source 1..20: mol_type = other RNA
gggaagagccactcggctgc

SEQ ID NO: 4924 - RNA, 20 nt, synthetic construct
  source 1..20: mol_type = other RNA
gggcaactgcgcgctgcacg

SEQ ID NO: 4925 - RNA, 20 nt, synthetic construct
  source 1..20: mol_type = other RNA
gggcacgctggcgctcgtgg

SEQ ID NO: 4926 - RNA, 20 nt, synthetic construct
  source 1..20: mol_type = other RNA
gggccaggcggtgcagcgac

SEQ ID NO: 4927 - RNA, 20 nt, synthetic construct
  source 1..20: mol_type = other RNA
gggcccgacgacctgcagcg

SEQ ID NO: 4928 - RNA, 20 nt, synthetic construct
  source 1..20: mol_type = other RNA
gggcccgcggccctggcttg

SEQ ID NO: 4929 - RNA, 20 nt, synthetic construct
  source 1..20: mol_type = other RNA
gggccgcgggcccgacgacc

SEQ ID NO: 4930 - RNA, 20 nt, synthetic construct
  source 1..20: mol_type = other RNA
gggcgaagcggccagggtcc

SEQ ID NO: 4931 - RNA, 20 nt, synthetic construct
  source 1..20: mol_type = other RNA
gggcgtgatcctgaacctgg

SEQ ID NO: 4932 - RNA, 20 nt, synthetic construct
  source 1..20: mol_type = other RNA
gggctgggcgtgatcctgaa

SEQ ID NO: 4933 - RNA, 20 nt, synthetic construct
  source 1..20: mol_type = other RNA
gggctttctacctctgcgcc

SEQ ID NO: 4934 - RNA, 20 nt, synthetic construct
  source 1..20: mol_type = other RNA
ggggccaggcggtgcagcga

SEQ ID NO: 4935 - RNA, 20 nt, synthetic construct
  source 1..20: mol_type = other RNA
ggggctttctacctctgcgc

SEQ ID NO: 4936 - RNA, 20 nt, synthetic construct
  source 1..20: mol_type = other RNA
gggggccaggcggtgcagcg

SEQ ID NO: 4937 - RNA, 20 nt, synthetic construct
  source 1..20: mol_type = other RNA
ggggtccgtgcggcggcacc

SEQ ID NO: 4938 - RNA, 20 nt, synthetic construct
  source 1..20: mol_type = other RNA
gggtccagcgaggccacaag

SEQ ID NO: 4939 - RNA, 20 nt, synthetic construct
  source 1..20: mol_type = other RNA
gggtccgtgcggcggcacca

SEQ ID NO: 4940 - RNA, 20 nt, synthetic construct
  source 1..20: mol_type = other RNA
gggttcgcgttccttcgcca

SEQ ID NO: 4941 - RNA, 20 nt, synthetic construct
  source 1..20: mol_type = other RNA
ggtagaaagccccgatgcac

SEQ ID NO: 4942 - RNA, 20 nt, synthetic construct
  source 1..20: mol_type = other RNA
ggtagagaagcgcgcagccg

SEQ ID NO: 4943 - RNA, 20 nt, synthetic construct
  source 1..20: mol_type = other RNA
ggtccagcgaggccacaagc

SEQ ID NO: 4944 - RNA, 20 nt, synthetic construct
  source 1..20: mol_type = other RNA
ggtccgtgcggcggcaccaa

SEQ ID NO: 4945 - RNA, 20 nt, synthetic construct
  source 1..20: mol_type = other RNA
ggtcgtcgggcccgcggccc

SEQ ID NO: 4946 - RNA, 20 nt, synthetic construct
  source 1..20: mol_type = other RNA
ggtcttgccttgcaggctct

SEQ ID NO: 4947 - RNA, 20 nt, synthetic construct
  source 1..20: mol_type = other RNA
ggtgcagcgacgcatggtag

SEQ ID NO: 4948 - RNA, 20 nt, synthetic construct
  source 1..20: mol_type = other RNA
ggtgccgccgcacggacccc

SEQ ID NO: 4949 - RNA, 20 nt, synthetic construct
  source 1..20: mol_type = other RNA
ggtgctgtattggtgccgcc

SEQ ID NO: 4950 - RNA, 20 nt, synthetic construct
  source 1..20: mol_type = other RNA
ggtggacgccagcgacacaa

SEQ ID NO: 4951 - RNA, 20 nt, synthetic construct
  source 1..20: mol_type = other RNA
ggtggagcgcgaggtggagc

SEQ ID NO: 4952 - RNA, 20 nt, synthetic construct
  source 1..20: mol_type = other RNA
ggtggagcgctcgggcacgc

SEQ ID NO: 4953 - RNA, 20 nt, synthetic construct
  source 1..20: mol_type = other RNA
ggtggcggccggcggcctgg

SEQ ID NO: 4954 - RNA, 20 nt, synthetic construct
  source 1..20: mol_type = other RNA
ggtgggtgcagatgtggggt

SEQ ID NO: 4955 - RNA, 20 nt, synthetic construct
  source 1..20: mol_type = other RNA
ggtgttggcgactaacaagg

SEQ ID NO: 4956 - RNA, 20 nt, synthetic construct
  source 1..20: mol_type = other RNA
ggttagagtcgagcaacggc

SEQ ID NO: 4957 - RNA, 20 nt, synthetic construct
  source 1..20: mol_type = other RNA
ggttcaggatcacgcccagc

SEQ ID NO: 4958 - RNA, 20 nt, synthetic construct
  source 1..20: mol_type = other RNA
ggttcgcgttccttcgccag

SEQ ID NO: 4959 - RNA, 20 nt, synthetic construct
  source 1..20: mol_type = other RNA
gtagaaagccccgatgcact

SEQ ID NO: 4960 - RNA, 20 nt, synthetic construct
  source 1..20: mol_type = other RNA
gtagagaagcgcgcagccga

SEQ ID NO: 4961 - RNA, 20 nt, synthetic construct
  source 1..20: mol_type = other RNA
gtagagctggcgcggagcgt

SEQ ID NO: 4962 - RNA, 20 nt, synthetic construct
  source 1..20: mol_type = other RNA
gtagcggtgttggcgactaa

SEQ ID NO: 4963 - RNA, 20 nt, synthetic construct
  source 1..20: mol_type = other RNA
gtattggtgccgccgcacgg

SEQ ID NO: 4964 - RNA, 20 nt, synthetic construct
  source 1..20: mol_type = other RNA
gtccaccagacagcgggcga

SEQ ID NO: 4965 - RNA, 20 nt, synthetic construct
  source 1..20: mol_type = other RNA
gtccagcgaggccacaagcg

SEQ ID NO: 4966 - RNA, 20 nt, synthetic construct
  source 1..20: mol_type = other RNA
gtccaggccgccggccgcca

SEQ ID NO: 4967 - RNA, 20 nt, synthetic construct
  source 1..20: mol_type = other RNA
gtccgtgcggcggcaccaat

SEQ ID NO: 4968 - RNA, 20 nt, synthetic construct
  source 1..20: mol_type = other RNA
gtcctccttggagaaggcga

SEQ ID NO: 4969 - RNA, 20 nt, synthetic construct
  source 1..20: mol_type = other RNA
gtcgagcaacggcacgaggc

SEQ ID NO: 4970 - RNA, 20 nt, synthetic construct
  source 1..20: mol_type = other RNA
gtcgccaacaccgctactgc

SEQ ID NO: 4971 - RNA, 20 nt, synthetic construct
  source 1..20: mol_type = other RNA
gtcgctgcaccgcctggccc

SEQ ID NO: 4972 - RNA, 20 nt, synthetic construct
  source 1..20: mol_type = other RNA
gtcgctggcgtccaccagac

SEQ ID NO: 4973 - RNA, 20 nt, synthetic construct
  source 1..20: mol_type = other RNA
gtcgggcccgcggccctggc

SEQ ID NO: 4974 - RNA, 20 nt, synthetic construct
  source 1..20: mol_type = other RNA
gtcgtcgggcccgcggccct

SEQ ID NO: 4975 - RNA, 20 nt, synthetic construct
  source 1..20: mol_type = other RNA
gtctcctccgaatgcttgaa

SEQ ID NO: 4976 - RNA, 20 nt, synthetic construct
  source 1..20: mol_type = other RNA
gtctggtggacgccagcgac

SEQ ID NO: 4977 - RNA, 20 nt, synthetic construct
  source 1..20: mol_type = other RNA
gtcttgccttgcaggctctt

SEQ ID NO: 4978 - RNA, 20 nt, synthetic construct
  source 1..20: mol_type = other RNA
gtgatcctgaacctggcgaa

SEQ ID NO: 4979 - RNA, 20 nt, synthetic construct
  source 1..20: mol_type = other RNA
gtgcagccgaagcagctcgt

SEQ ID NO: 4980 - RNA, 20 nt, synthetic construct
  source 1..20: mol_type = other RNA
gtgcagcgacgcatggtaga

SEQ ID NO: 4981 - RNA, 20 nt, synthetic construct
  source 1..20: mol_type = other RNA
gtgcagcgcgcagttgccca

SEQ ID NO: 4982 - RNA, 20 nt, synthetic construct
  source 1..20: mol_type = other RNA
gtgcatcggggctttctacc

SEQ ID NO: 4983 - RNA, 20 nt, synthetic construct
  source 1..20: mol_type = other RNA
gtgcccgagcgctccacctc

SEQ ID NO: 4984 - RNA, 20 nt, synthetic construct
  source 1..20: mol_type = other RNA
gtgccgccgcacggaccccg

SEQ ID NO: 4985 - RNA, 20 nt, synthetic construct
  source 1..20: mol_type = other RNA
gtgccgttgctcgactctaa

SEQ ID NO: 4986 - RNA, 20 nt, synthetic construct
  source 1..20: mol_type = other RNA
gtgcggcggcaccaatacag

SEQ ID NO: 4987 - RNA, 20 nt, synthetic construct
  source 1..20: mol_type = other RNA
gtgctccaagatgcctgcca

SEQ ID NO: 4988 - RNA, 20 nt, synthetic construct
  source 1..20: mol_type = other RNA
gtgctgtattggtgccgccg

SEQ ID NO: 4989 - RNA, 20 nt, synthetic construct
  source 1..20: mol_type = other RNA
gtggacgccagcgacacaag

SEQ ID NO: 4990 - RNA, 20 nt, synthetic construct
  source 1..20: mol_type = other RNA
gtggagccgcttgtggcctc

SEQ ID NO: 4991 - RNA, 20 nt, synthetic construct
  source 1..20: mol_type = other RNA
gtggagcgcgaggtggagcg

SEQ ID NO: 4992 - RNA, 20 nt, synthetic construct
  source 1..20: mol_type = other RNA
gtggagcgctcgggcacgct

SEQ ID NO: 4993 - RNA, 20 nt, synthetic construct
  source 1..20: mol_type = other RNA
gtggcaggcatcttggagca

SEQ ID NO: 4994 - RNA, 20 nt, synthetic construct
  source 1..20: mol_type = other RNA
gtggcctcgctggaccctgg

SEQ ID NO: 4995 - RNA, 20 nt, synthetic construct
  source 1..20: mol_type = other RNA
gtggcgcagcagcgcggggt

SEQ ID NO: 4996 - RNA, 20 nt, synthetic construct
  source 1..20: mol_type = other RNA
gtggcgcgcattgggctggg

SEQ ID NO: 4997 - RNA, 20 nt, synthetic construct
  source 1..20: mol_type = other RNA
gtggcggccggcggcctgga

SEQ ID NO: 4998 - RNA, 20 nt, synthetic construct
  source 1..20: mol_type = other RNA
gtggctcttcccgctcgcct

SEQ ID NO: 4999 - RNA, 20 nt, synthetic construct
  source 1..20: mol_type = other RNA
gtgggtgcagatgtggggtt

SEQ ID NO: 5000 - RNA, 20 nt, synthetic construct
  source 1..20: mol_type = other RNA
gtgtcgctggcgtccaccag

SEQ ID NO: 5001 - RNA, 20 nt, synthetic construct
  source 1..20: mol_type = other RNA
gtgttggcgactaacaagga

SEQ ID NO: 5002 - RNA, 20 nt, synthetic construct
  source 1..20: mol_type = other RNA
gttagagtcgagcaacggca

SEQ ID NO: 5003 - RNA, 20 nt, synthetic construct
  source 1..20: mol_type = other RNA
gttagtcgccaacaccgcta

SEQ ID NO: 5004 - RNA, 20 nt, synthetic construct
  source 1..20: mol_type = other RNA
gttcaagcattcggaggaga

SEQ ID NO: 5005 - RNA, 20 nt, synthetic construct
  source 1..20: mol_type = other RNA
gttcaggatcacgcccagcc

SEQ ID NO: 5006 - RNA, 20 nt, synthetic construct
  source 1..20: mol_type = other RNA
gttccttcgccaggttcagg

SEQ ID NO: 5007 - RNA, 20 nt, synthetic construct
  source 1..20: mol_type = other RNA
gttcgcgttccttcgccagg

SEQ ID NO: 5008 - RNA, 20 nt, synthetic construct
  source 1..20: mol_type = other RNA
gttgcccagcgccagcgcgc

SEQ ID NO: 5009 - RNA, 20 nt, synthetic construct
  source 1..20: mol_type = other RNA
gttgctcgactctaaccgct

SEQ ID NO: 5010 - RNA, 20 nt, synthetic construct
  source 1..20: mol_type = other RNA
gttggcgactaacaaggagg

SEQ ID NO: 5011 - RNA, 20 nt, synthetic construct
  source 1..20: mol_type = other RNA
taacaaggaggtggagcgcg

SEQ ID NO: 5012 - RNA, 20 nt, synthetic construct
  source 1..20: mol_type = other RNA
taaccgcttggaggcgcagt

SEQ ID NO: 5013 - RNA, 20 nt, synthetic construct
  source 1..20: mol_type = other RNA
tacagcaccgcgtccaggcc

SEQ ID NO: 5014 - RNA, 20 nt, synthetic construct
  source 1..20: mol_type = other RNA
taccatgcgtcgctgcaccg

SEQ ID NO: 5015 - RNA, 20 nt, synthetic construct
  source 1..20: mol_type = other RNA
tacctctgcgccgaggctgc

SEQ ID NO: 5016 - RNA, 20 nt, synthetic construct
  source 1..20: mol_type = other RNA
tacgggttcgcgttccttcg

SEQ ID NO: 5017 - RNA, 20 nt, synthetic construct
  source 1..20: mol_type = other RNA
tactgcgaggcaggcgtgca

SEQ ID NO: 5018 - RNA, 20 nt, synthetic construct
  source 1..20: mol_type = other RNA
tagaaagccccgatgcactg

SEQ ID NO: 5019 - RNA, 20 nt, synthetic construct
  source 1..20: mol_type = other RNA
tagagaagcgcgcagccgag

SEQ ID NO: 5020 - RNA, 20 nt, synthetic construct
  source 1..20: mol_type = other RNA
tagagctggcgcggagcgtg

SEQ ID NO: 5021 - RNA, 20 nt, synthetic construct
  source 1..20: mol_type = other RNA
tagagtcgagcaacggcacg

SEQ ID NO: 5022 - RNA, 20 nt, synthetic construct
  source 1..20: mol_type = other RNA
tagcggtgttggcgactaac

SEQ ID NO: 5023 - RNA, 20 nt, synthetic construct
  source 1..20: mol_type = other RNA
tagtcgccaacaccgctact

SEQ ID NO: 5024 - RNA, 20 nt, synthetic construct
  source 1..20: mol_type = other RNA
tattggtgccgccgcacgga

SEQ ID NO: 5025 - RNA, 20 nt, synthetic construct
  source 1..20: mol_type = other RNA
tcaagagcctgcaaggcaag

SEQ ID NO: 5026 - RNA, 20 nt, synthetic construct
  source 1..20: mol_type = other RNA
tcaagcattcggaggagaca

SEQ ID NO: 5027 - RNA, 20 nt, synthetic construct
  source 1..20: mol_type = other RNA
tcacgcccagcccaatgcgc

SEQ ID NO: 5028 - RNA, 20 nt, synthetic construct
  source 1..20: mol_type = other RNA
tcaggatcacgcccagccca

SEQ ID NO: 5029 - RNA, 20 nt, synthetic construct
  source 1..20: mol_type = other RNA
tccaagatgcctgccacgct

SEQ ID NO: 5030 - RNA, 20 nt, synthetic construct
  source 1..20: mol_type = other RNA
tccaagcggttagagtcgag

SEQ ID NO: 5031 - RNA, 20 nt, synthetic construct
  source 1..20: mol_type = other RNA
tccaaggaggacgagctgct

SEQ ID NO: 5032 - RNA, 20 nt, synthetic construct
  source 1..20: mol_type = other RNA
tccaccagacagcgggcgaa

SEQ ID NO: 5033 - RNA, 20 nt, synthetic construct
  source 1..20: mol_type = other RNA
tccacccaaccccacatctg

SEQ ID NO: 5034 - RNA, 20 nt, synthetic construct
  source 1..20: mol_type = other RNA
tccacctccttgttagtcgc

SEQ ID NO: 5035 - RNA, 20 nt, synthetic construct
  source 1..20: mol_type = other RNA
tccacctcgcgctccacctc

SEQ ID NO: 5036 - RNA, 20 nt, synthetic construct
  source 1..20: mol_type = other RNA
tccacgagcgccagcgtgcc

SEQ ID NO: 5037 - RNA, 20 nt, synthetic construct
  source 1..20: mol_type = other RNA
tccagcgaggccacaagcgg

SEQ ID NO: 5038 - RNA, 20 nt, synthetic construct
  source 1..20: mol_type = other RNA
tccaggccgccggccgccac

SEQ ID NO: 5039 - RNA, 20 nt, synthetic construct
  source 1..20: mol_type = other RNA
tcccgctcgccttctccaag

SEQ ID NO: 5040 - RNA, 20 nt, synthetic construct
  source 1..20: mol_type = other RNA
tccgaatgcttgaacatgtg

SEQ ID NO: 5041 - RNA, 20 nt, synthetic construct
  source 1..20: mol_type = other RNA
tccgcgccagctctacgggt

SEQ ID NO: 5042 - RNA, 20 nt, synthetic construct
  source 1..20: mol_type = other RNA
tccgtgcggcggcaccaata

SEQ ID NO: 5043 - RNA, 20 nt, synthetic construct
  source 1..20: mol_type = other RNA
tcctccgaatgcttgaacat

SEQ ID NO: 5044 - RNA, 20 nt, synthetic construct
  source 1..20: mol_type = other RNA
tcctccttggagaaggcgag

SEQ ID NO: 5045 - RNA, 20 nt, synthetic construct
  source 1..20: mol_type = other RNA
tcctgaacctggcgaaggaa

SEQ ID NO: 5046 - RNA, 20 nt, synthetic construct
  source 1..20: mol_type = other RNA
tccttcgccaggttcaggat

SEQ ID NO: 5047 - RNA, 20 nt, synthetic construct
  source 1..20: mol_type = other RNA
tccttggagaaggcgagcgg

SEQ ID NO: 5048 - RNA, 20 nt, synthetic construct
  source 1..20: mol_type = other RNA
tccttgttagtcgccaacac

SEQ ID NO: 5049 - RNA, 20 nt, synthetic construct
  source 1..20: mol_type = other RNA
tcgactctaaccgcttggag

SEQ ID NO: 5050 - RNA, 20 nt, synthetic construct
  source 1..20: mol_type = other RNA
tcgagcaacggcacgaggcg

SEQ ID NO: 5051 - RNA, 20 nt, synthetic construct
  source 1..20: mol_type = other RNA
tcgcagtagcggtgttggcg

SEQ ID NO: 5052 - RNA, 20 nt, synthetic construct
  source 1..20: mol_type = other RNA
tcgccaacaccgctactgcg

SEQ ID NO: 5053 - RNA, 20 nt, synthetic construct
  source 1..20: mol_type = other RNA
tcgccaggttcaggatcacg

SEQ ID NO: 5054 - RNA, 20 nt, synthetic construct
  source 1..20: mol_type = other RNA
tcgcccgctgtctggtggac

SEQ ID NO: 5055 - RNA, 20 nt, synthetic construct
  source 1..20: mol_type = other RNA
tcgccttctccaaggaggac

SEQ ID NO: 5056 - RNA, 20 nt, synthetic construct
  source 1..20: mol_type = other RNA
tcgcgctccacctccttgtt

SEQ ID NO: 5057 - RNA, 20 nt, synthetic construct
  source 1..20: mol_type = other RNA
tcgcgttccttcgccaggtt

SEQ ID NO: 5058 - RNA, 20 nt, synthetic construct
  source 1..20: mol_type = other RNA
tcgctgcaccgcctggcccc

SEQ ID NO: 5059 - RNA, 20 nt, synthetic construct
  source 1..20: mol_type = other RNA
tcgctggaccctggccgctt

SEQ ID NO: 5060 - RNA, 20 nt, synthetic construct
  source 1..20: mol_type = other RNA
tcgctggcgtccaccagaca

SEQ ID NO: 5061 - RNA, 20 nt, synthetic construct
  source 1..20: mol_type = other RNA
tcggaggagacatgccagag

SEQ ID NO: 5062 - RNA, 20 nt, synthetic construct
  source 1..20: mol_type = other RNA
tcggcgcagaggtagaaagc

SEQ ID NO: 5063 - RNA, 20 nt, synthetic construct
  source 1..20: mol_type = other RNA
tcggctgcacgcctgcctcg

SEQ ID NO: 5064 - RNA, 20 nt, synthetic construct
  source 1..20: mol_type = other RNA
tcggctgcgcgcttctctac

SEQ ID NO: 5065 - RNA, 20 nt, synthetic construct
  source 1..20: mol_type = other RNA
tcgggcacgctggcgctcgt

SEQ ID NO: 5066 - RNA, 20 nt, synthetic construct
  source 1..20: mol_type = other RNA
tcgggcccgcggccctggct

SEQ ID NO: 5067 - RNA, 20 nt, synthetic construct
  source 1..20: mol_type = other RNA
tcggggctttctacctctgc

SEQ ID NO: 5068 - RNA, 20 nt, synthetic construct
  source 1..20: mol_type = other RNA
tcgtcctccttggagaaggc

SEQ ID NO: 5069 - RNA, 20 nt, synthetic construct
  source 1..20: mol_type = other RNA
tcgtcgggcccgcggccctg

SEQ ID NO: 5070 - RNA, 20 nt, synthetic construct
  source 1..20: mol_type = other RNA
tcgtgccgttgctcgactct

SEQ ID NO: 5071 - RNA, 20 nt, synthetic construct
  source 1..20: mol_type = other RNA
tcgtggagccgcttgtggcc

SEQ ID NO: 5072 - RNA, 20 nt, synthetic construct
  source 1..20: mol_type = other RNA
tctaaccgcttggaggcgca

SEQ ID NO: 5073 - RNA, 20 nt, synthetic construct
  source 1..20: mol_type = other RNA
tctaccatgcgtcgctgcac

SEQ ID NO: 5074 - RNA, 20 nt, synthetic construct
  source 1..20: mol_type = other RNA
tctacctctgcgccgaggct

SEQ ID NO: 5075 - RNA, 20 nt, synthetic construct
  source 1..20: mol_type = other RNA
tctacgggttcgcgttcctt

SEQ ID NO: 5076 - RNA, 20 nt, synthetic construct
  source 1..20: mol_type = other RNA
tctccaaggaggacgagctg

SEQ ID NO: 5077 - RNA, 20 nt, synthetic construct
  source 1..20: mol_type = other RNA
tctcctccgaatgcttgaac

SEQ ID NO: 5078 - RNA, 20 nt, synthetic construct
  source 1..20: mol_type = other RNA
tctctaccatgcgtcgctgc

SEQ ID NO: 5079 - RNA, 20 nt, synthetic construct
  source 1..20: mol_type = other RNA
tctgcacccaccttggtctt

SEQ ID NO: 5080 - RNA, 20 nt, synthetic construct
  source 1..20: mol_type = other RNA
tctgcgccgaggctgccatc

SEQ ID NO: 5081 - RNA, 20 nt, synthetic construct
  source 1..20: mol_type = other RNA
tctggcatgtctcctccgaa

SEQ ID NO: 5082 - RNA, 20 nt, synthetic construct
  source 1..20: mol_type = other RNA
tctggtggacgccagcgaca

SEQ ID NO: 5083 - RNA, 20 nt, synthetic construct
  source 1..20: mol_type = other RNA
tcttcccgctcgccttctcc

SEQ ID NO: 5084 - RNA, 20 nt, synthetic construct
  source 1..20: mol_type = other RNA
tcttgatggcagcctcggcg

SEQ ID NO: 5085 - RNA, 20 nt, synthetic construct
  source 1..20: mol_type = other RNA
tcttgccttgcaggctcttg

SEQ ID NO: 5086 - RNA, 20 nt, synthetic construct
  source 1..20: mol_type = other RNA
tcttggagcacatgttcaag

SEQ ID NO: 5087 - RNA, 20 nt, synthetic construct
  source 1..20: mol_type = other RNA
tgaacatgtgctccaagatg

SEQ ID NO: 5088 - RNA, 20 nt, synthetic construct
  source 1..20: mol_type = other RNA
tgaacctggcgaaggaacgc

SEQ ID NO: 5089 - RNA, 20 nt, synthetic construct
  source 1..20: mol_type = other RNA
tgatcctgaacctggcgaag

SEQ ID NO: 5090 - RNA, 20 nt, synthetic construct
  source 1..20: mol_type = other RNA
tgatggcagcctcggcgcag

SEQ ID NO: 5091 - RNA, 20 nt, synthetic construct
  source 1..20: mol_type = other RNA
tgcaaggcaagaccaaggtg

SEQ ID NO: 5092 - RNA, 20 nt, synthetic construct
  source 1..20: mol_type = other RNA
tgcacccaccttggtcttgc

SEQ ID NO: 5093 - RNA, 20 nt, synthetic construct
  source 1..20: mol_type = other RNA
tgcaccgcctggcccccgtg

SEQ ID NO: 5094 - RNA, 20 nt, synthetic construct
  source 1..20: mol_type = other RNA
tgcacgcctgcctcgcagta

SEQ ID NO: 5095 - RNA, 20 nt, synthetic construct
  source 1..20: mol_type = other RNA
tgcacgggggccaggcggtg

SEQ ID NO: 5096 - RNA, 20 nt, synthetic construct
  source 1..20: mol_type = other RNA
tgcactgcgcctccaagcgg

SEQ ID NO: 5097 - RNA, 20 nt, synthetic construct
  source 1..20: mol_type = other RNA
tgcagccgaagcagctcgtc

SEQ ID NO: 5098 - RNA, 20 nt, synthetic construct
  source 1..20: mol_type = other RNA
tgcagcgacgcatggtagag

SEQ ID NO: 5099 - RNA, 20 nt, synthetic construct
  source 1..20: mol_type = other RNA
tgcagcgcctcgtgccgttg

SEQ ID NO: 5100 - RNA, 20 nt, synthetic construct
  source 1..20: mol_type = other RNA
tgcagcgcgcagttgcccag

SEQ ID NO: 5101 - RNA, 20 nt, synthetic construct
  source 1..20: mol_type = other RNA
tgcaggctcttgatggcagc

SEQ ID NO: 5102 - RNA, 20 nt, synthetic construct
  source 1..20: mol_type = other RNA
tgcaggtcgtcgggcccgcg

SEQ ID NO: 5103 - RNA, 20 nt, synthetic construct
  source 1..20: mol_type = other RNA
tgcatcggggctttctacct

SEQ ID NO: 5104 - RNA, 20 nt, synthetic construct
  source 1..20: mol_type = other RNA
tgccacgctccgcgccagct

SEQ ID NO: 5105 - RNA, 20 nt, synthetic construct
  source 1..20: mol_type = other RNA
tgccagaggctggtggcggc

SEQ ID NO: 5106 - RNA, 20 nt, synthetic construct
  source 1..20: mol_type = other RNA
tgccatcaagagcctgcaag

SEQ ID NO: 5107 - RNA, 20 nt, synthetic construct
  source 1..20: mol_type = other RNA
tgcccagcgccagcgcgcag

SEQ ID NO: 5108 - RNA, 20 nt, synthetic construct
  source 1..20: mol_type = other RNA
tgcccgagcgctccacctcg

SEQ ID NO: 5109 - RNA, 20 nt, synthetic construct
  source 1..20: mol_type = other RNA
tgccgccgcacggaccccgc

SEQ ID NO: 5110 - RNA, 20 nt, synthetic construct
  source 1..20: mol_type = other RNA
tgccgttgctcgactctaac

SEQ ID NO: 5111 - RNA, 20 nt, synthetic construct
  source 1..20: mol_type = other RNA
tgcctcgcagtagcggtgtt

SEQ ID NO: 5112 - RNA, 20 nt, synthetic construct
  source 1..20: mol_type = other RNA
tgcctgccacgctccgcgcc

SEQ ID NO: 5113 - RNA, 20 nt, synthetic construct
  source 1..20: mol_type = other RNA
tgccttgcaggctcttgatg

SEQ ID NO: 5114 - RNA, 20 nt, synthetic construct
  source 1..20: mol_type = other RNA
tgcgaggcaggcgtgcagcc

SEQ ID NO: 5115 - RNA, 20 nt, synthetic construct
  source 1..20: mol_type = other RNA
tgcgccactgcgcgctggcg

SEQ ID NO: 5116 - RNA, 20 nt, synthetic construct
  source 1..20: mol_type = other RNA
tgcgccgaggctgccatcaa

SEQ ID NO: 5117 - RNA, 20 nt, synthetic construct
  source 1..20: mol_type = other RNA
tgcgcctccaagcggttaga

SEQ ID NO: 5118 - RNA, 20 nt, synthetic construct
  source 1..20: mol_type = other RNA
tgcgcgctgcacgggggcca

SEQ ID NO: 5119 - RNA, 20 nt, synthetic construct
  source 1..20: mol_type = other RNA
tgcgcgctggcgctgggcaa

SEQ ID NO: 5120 - RNA, 20 nt, synthetic construct
  source 1..20: mol_type = other RNA
tgcgcgcttctctaccatgc

SEQ ID NO: 5121 - RNA, 20 nt, synthetic construct
  source 1..20: mol_type = other RNA
tgcggcggcaccaatacagc

SEQ ID NO: 5122 - RNA, 20 nt, synthetic construct
  source 1..20: mol_type = other RNA
tgcgtcgctgcaccgcctgg

SEQ ID NO: 5123 - RNA, 20 nt, synthetic construct
  source 1..20: mol_type = other RNA
tgctccaagatgcctgccac

SEQ ID NO: 5124 - RNA, 20 nt, synthetic construct
  source 1..20: mol_type = other RNA
tgctcgactctaaccgcttg

SEQ ID NO: 5125 - RNA, 20 nt, synthetic construct
  source 1..20: mol_type = other RNA
tgctgcgccactgcgcgctg

SEQ ID NO: 5126 - RNA, 20 nt, synthetic construct
  source 1..20: mol_type = other RNA
tgctgtattggtgccgccgc

SEQ ID NO: 5127 - RNA, 20 nt, synthetic construct
  source 1..20: mol_type = other RNA
tgcttcggctgcacgcctgc

SEQ ID NO: 5128 - RNA, 20 nt, synthetic construct
  source 1..20: mol_type = other RNA
tgcttgaacatgtgctccaa

SEQ ID NO: 5129 - RNA, 20 nt, synthetic construct
  source 1..20: mol_type = other RNA
tggaccctggccgcttcgcc

SEQ ID NO: 5130 - RNA, 20 nt, synthetic construct
  source 1..20: mol_type = other RNA
tggacgccagcgacacaagc

SEQ ID NO: 5131 - RNA, 20 nt, synthetic construct
  source 1..20: mol_type = other RNA
tggacgcggtgctgtattgg

SEQ ID NO: 5132 - RNA, 20 nt, synthetic construct
  source 1..20: mol_type = other RNA
tggagaaggcgagcgggaag

SEQ ID NO: 5133 - RNA, 20 nt, synthetic construct
  source 1..20: mol_type = other RNA
tggagcacatgttcaagcat

SEQ ID NO: 5134 - RNA, 20 nt, synthetic construct
  source 1..20: mol_type = other RNA
tggagccgcttgtggcctcg

SEQ ID NO: 5135 - RNA, 20 nt, synthetic construct
  source 1..20: mol_type = other RNA
tggagcgcgaggtggagcgc

SEQ ID NO: 5136 - RNA, 20 nt, synthetic construct
  source 1..20: mol_type = other RNA
tggagcgctcgggcacgctg

SEQ ID NO: 5137 - RNA, 20 nt, synthetic construct
  source 1..20: mol_type = other RNA
tggaggcgcagtgcatcggg

SEQ ID NO: 5138 - RNA, 20 nt, synthetic construct
  source 1..20: mol_type = other RNA
tggcagcctcggcgcagagg

SEQ ID NO: 5139 - RNA, 20 nt, synthetic construct
  source 1..20: mol_type = other RNA
tggcaggcatcttggagcac

SEQ ID NO: 5140 - RNA, 20 nt, synthetic construct
  source 1..20: mol_type = other RNA
tggcatgtctcctccgaatg

SEQ ID NO: 5141 - RNA, 20 nt, synthetic construct
  source 1..20: mol_type = other RNA
tggcccccgtgcagcgcgca

SEQ ID NO: 5142 - RNA, 20 nt, synthetic construct
  source 1..20: mol_type = other RNA
tggccgcttcgcccgctgtc

SEQ ID NO: 5143 - RNA, 20 nt, synthetic construct
  source 1..20: mol_type = other RNA
tggcctcgctggaccctggc

SEQ ID NO: 5144 - RNA, 20 nt, synthetic construct
  source 1..20: mol_type = other RNA
tggcgaaggaacgcgaaccc

SEQ ID NO: 5145 - RNA, 20 nt, synthetic construct
  source 1..20: mol_type = other RNA
tggcgactaacaaggaggtg

SEQ ID NO: 5146 - RNA, 20 nt, synthetic construct
  source 1..20: mol_type = other RNA
tggcgcagcagcgcggggtc

SEQ ID NO: 5147 - RNA, 20 nt, synthetic construct
  source 1..20: mol_type = other RNA
tggcgcgcattgggctgggc

SEQ ID NO: 5148 - RNA, 20 nt, synthetic construct
  source 1..20: mol_type = other RNA
tggcgcggagcgtggcaggc

SEQ ID NO: 5149 - RNA, 20 nt, synthetic construct
  source 1..20: mol_type = other RNA
tggcgctcgtggagccgctt

SEQ ID NO: 5150 - RNA, 20 nt, synthetic construct
  source 1..20: mol_type = other RNA
tggcgctgggcaactgcgcg

SEQ ID NO: 5151 - RNA, 20 nt, synthetic construct
  source 1..20: mol_type = other RNA
tggcggccggcggcctggac

SEQ ID NO: 5152 - RNA, 20 nt, synthetic construct
  source 1..20: mol_type = other RNA
tggcgtccaccagacagcgg

SEQ ID NO: 5153 - RNA, 20 nt, synthetic construct
  source 1..20: mol_type = other RNA
tggctcttcccgctcgcctt

SEQ ID NO: 5154 - RNA, 20 nt, synthetic construct
  source 1..20: mol_type = other RNA
tggcttgtgtcgctggcgtc

SEQ ID NO: 5155 - RNA, 20 nt, synthetic construct
  source 1..20: mol_type = other RNA
tgggcaactgcgcgctgcac

SEQ ID NO: 5156 - RNA, 20 nt, synthetic construct
  source 1..20: mol_type = other RNA
tgggcgtgatcctgaacctg

SEQ ID NO: 5157 - RNA, 20 nt, synthetic construct
  source 1..20: mol_type = other RNA
tgggctgggcgtgatcctga

SEQ ID NO: 5158 - RNA, 20 nt, synthetic construct
  source 1..20: mol_type = other RNA
tggtagagaagcgcgcagcc

SEQ ID NO: 5159 - RNA, 20 nt, synthetic construct
  source 1..20: mol_type = other RNA
tggtcttgccttgcaggctc

SEQ ID NO: 5160 - RNA, 20 nt, synthetic construct
  source 1..20: mol_type = other RNA
tggtgccgccgcacggaccc

SEQ ID NO: 5161 - RNA, 20 nt, synthetic construct
  source 1..20: mol_type = other RNA
tggtggacgccagcgacaca

SEQ ID NO: 5162 - RNA, 20 nt, synthetic construct
  source 1..20: mol_type = other RNA
tggtggcggccggcggcctg

SEQ ID NO: 5163 - RNA, 20 nt, synthetic construct
  source 1..20: mol_type = other RNA
tgtattggtgccgccgcacg

SEQ ID NO: 5164 - RNA, 20 nt, synthetic construct
  source 1..20: mol_type = other RNA
tgtcgctggcgtccaccaga

SEQ ID NO: 5165 - RNA, 20 nt, synthetic construct
  source 1..20: mol_type = other RNA
tgtctcctccgaatgcttga

SEQ ID NO: 5166 - RNA, 20 nt, synthetic construct
  source 1..20: mol_type = other RNA
tgtctggtggacgccagcga

SEQ ID NO: 5167 - RNA, 20 nt, synthetic construct
  source 1..20: mol_type = other RNA
tgtgctccaagatgcctgcc

SEQ ID NO: 5168 - RNA, 20 nt, synthetic construct
  source 1..20: mol_type = other RNA
tgtggcctcgctggaccctg

SEQ ID NO: 5169 - RNA, 20 nt, synthetic construct
  source 1..20: mol_type = other RNA
tgtgtcgctggcgtccacca

SEQ ID NO: 5170 - RNA, 20 nt, synthetic construct
  source 1..20: mol_type = other RNA
tgttagtcgccaacaccgct

SEQ ID NO: 5171 - RNA, 20 nt, synthetic construct
  source 1..20: mol_type = other RNA
tgttcaagcattcggaggag

SEQ ID NO: 5172 - RNA, 20 nt, synthetic construct
  source 1..20: mol_type = other RNA
tgttggcgactaacaaggag

SEQ ID NO: 5173 - RNA, 20 nt, synthetic construct
  source 1..20: mol_type = other RNA
ttagagtcgagcaacggcac

SEQ ID NO: 5174 - RNA, 20 nt, synthetic construct
  source 1..20: mol_type = other RNA
ttagtcgccaacaccgctac

SEQ ID NO: 5175 - RNA, 20 nt, synthetic construct
  source 1..20: mol_type = other RNA
ttcaagcattcggaggagac

SEQ ID NO: 5176 - RNA, 20 nt, synthetic construct
  source 1..20: mol_type = other RNA
ttcaggatcacgcccagccc

SEQ ID NO: 5177 - RNA, 20 nt, synthetic construct
  source 1..20: mol_type = other RNA
ttcccgctcgccttctccaa

SEQ ID NO: 5178 - RNA, 20 nt, synthetic construct
  source 1..20: mol_type = other RNA
ttccttcgccaggttcagga

SEQ ID NO: 5179 - RNA, 20 nt, synthetic construct
  source 1..20: mol_type = other RNA
ttcgccaggttcaggatcac

SEQ ID NO: 5180 - RNA, 20 nt, synthetic construct
  source 1..20: mol_type = other RNA
ttcgcccgctgtctggtgga

SEQ ID NO: 5181 - RNA, 20 nt, synthetic construct
  source 1..20: mol_type = other RNA
ttcgcgttccttcgccaggt

SEQ ID NO: 5182 - RNA, 20 nt, synthetic construct
  source 1..20: mol_type = other RNA
ttcggaggagacatgccaga

SEQ ID NO: 5183 - RNA, 20 nt, synthetic construct
  source 1..20: mol_type = other RNA
ttcggctgcacgcctgcctc

SEQ ID NO: 5184 - RNA, 20 nt, synthetic construct
  source 1..20: mol_type = other RNA
ttctacctctgcgccgaggc

SEQ ID NO: 5185 - RNA, 20 nt, synthetic construct
  source 1..20: mol_type = other RNA
ttctccaaggaggacgagct

SEQ ID NO: 5186 - RNA, 20 nt, synthetic construct
  source 1..20: mol_type = other RNA
ttctctaccatgcgtcgctg

SEQ ID NO: 5187 - RNA, 20 nt, synthetic construct
  source 1..20: mol_type = other RNA
ttgaacatgtgctccaagat

SEQ ID NO: 5188 - RNA, 20 nt, synthetic construct
  source 1..20: mol_type = other RNA
ttgatggcagcctcggcgca

SEQ ID NO: 5189 - RNA, 20 nt, synthetic construct
  source 1..20: mol_type = other RNA
ttgcaggctcttgatggcag

SEQ ID NO: 5190 - RNA, 20 nt, synthetic construct
  source 1..20: mol_type = other RNA
ttgcccagcgccagcgcgca

SEQ ID NO: 5191 - RNA, 20 nt, synthetic construct
  source 1..20: mol_type = other RNA
ttgccttgcaggctcttgat

SEQ ID NO: 5192 - RNA, 20 nt, synthetic construct
  source 1..20: mol_type = other RNA
ttgctcgactctaaccgctt

SEQ ID NO: 5193 - RNA, 20 nt, synthetic construct
  source 1..20: mol_type = other RNA
ttggagaaggcgagcgggaa

SEQ ID NO: 5194 - RNA, 20 nt, synthetic construct
  source 1..20: mol_type = other RNA
ttggagcacatgttcaagca

SEQ ID NO: 5195 - RNA, 20 nt, synthetic construct
  source 1..20: mol_type = other RNA
ttggaggcgcagtgcatcgg

SEQ ID NO: 5196 - RNA, 20 nt, synthetic construct
  source 1..20: mol_type = other RNA
ttggcgactaacaaggaggt

SEQ ID NO: 5197 - RNA, 20 nt, synthetic construct
  source 1..20: mol_type = other RNA
ttgggctgggcgtgatcctg

SEQ ID NO: 5198 - RNA, 20 nt, synthetic construct
  source 1..20: mol_type = other RNA
ttggtcttgccttgcaggct

SEQ ID NO: 5199 - RNA, 20 nt, synthetic construct
  source 1..20: mol_type = other RNA
ttggtgccgccgcacggacc

SEQ ID NO: 5200 - RNA, 20 nt, synthetic construct
  source 1..20: mol_type = other RNA
ttgtggcctcgctggaccct

SEQ ID NO: 5201 - RNA, 20 nt, synthetic construct
  source 1..20: mol_type = other RNA
ttgtgtcgctggcgtccacc

SEQ ID NO: 5202 - RNA, 20 nt, synthetic construct
  source 1..20: mol_type = other RNA
ttgttagtcgccaacaccgc

SEQ ID NO: 5203 - RNA, 20 nt, synthetic construct
  source 1..20: mol_type = other RNA
tttctacctctgcgccgagg

SEQ ID NO: 5204 - RNA, 21 nt, synthetic construct
  source 1..21: mol_type = other RNA
aaagccccgatgcactgcgcc

SEQ ID NO: 5205 - RNA, 21 nt, synthetic construct
  source 1..21: mol_type = other RNA
aacaaggaggtggagcgcgag

SEQ ID NO: 5206 - RNA, 21 nt, synthetic construct
  source 1..21: mol_type = other RNA
aacaccgctactgcgaggcag

SEQ ID NO: 5207 - RNA, 21 nt, synthetic construct
  source 1..21: mol_type = other RNA
aacatgtgctccaagatgcct

SEQ ID NO: 5208 - RNA, 21 nt, synthetic construct
  source 1..21: mol_type = other RNA
aaccccacatctgcacccacc

SEQ ID NO: 5209 - RNA, 21 nt, synthetic construct
  source 1..21: mol_type = other RNA
aacccgtagagctggcgcgga

SEQ ID NO: 5210 - RNA, 21 nt, synthetic construct
  source 1..21: mol_type = other RNA
aaccgcttggaggcgcagtgc

SEQ ID NO: 5211 - RNA, 21 nt, synthetic construct
  source 1..21: mol_type = other RNA
aacctggcgaaggaacgcgaa

SEQ ID NO: 5212 - RNA, 21 nt, synthetic construct
  source 1..21: mol_type = other RNA
aacgcgaacccgtagagctgg

SEQ ID NO: 5213 - RNA, 21 nt, synthetic construct
  source 1..21: mol_type = other RNA
aacggcacgaggcgctgcagg

SEQ ID NO: 5214 - RNA, 21 nt, synthetic construct
  source 1..21: mol_type = other RNA
aactgcgcgctgcacgggggc

SEQ ID NO: 5215 - RNA, 21 nt, synthetic construct
  source 1..21: mol_type = other RNA
aagaccaaggtgggtgcagat

SEQ ID NO: 5216 - RNA, 21 nt, synthetic construct
  source 1..21: mol_type = other RNA
aagagccactcggctgcgcgc

SEQ ID NO: 5217 - RNA, 21 nt, synthetic construct
  source 1..21: mol_type = other RNA
aagagcctgcaaggcaagacc

SEQ ID NO: 5218 - RNA, 21 nt, synthetic construct
  source 1..21: mol_type = other RNA
aagatgcctgccacgctccgc

SEQ ID NO: 5219 - RNA, 21 nt, synthetic construct
  source 1..21: mol_type = other RNA
aagcagctcgtcctccttgga

SEQ ID NO: 5220 - RNA, 21 nt, synthetic construct
  source 1..21: mol_type = other RNA
aagcattcggaggagacatgc

SEQ ID NO: 5221 - RNA, 21 nt, synthetic construct
  source 1..21: mol_type = other RNA
aagccagggccgcgggcccga

SEQ ID NO: 5222 - RNA, 21 nt, synthetic construct
  source 1..21: mol_type = other RNA
aagccccgatgcactgcgcct

SEQ ID NO: 5223 - RNA, 21 nt, synthetic construct
  source 1..21: mol_type = other RNA
aagcgcgcagccgagtggctc

SEQ ID NO: 5224 - RNA, 21 nt, synthetic construct
  source 1..21: mol_type = other RNA
aagcggccagggtccagcgag

SEQ ID NO: 5225 - RNA, 21 nt, synthetic construct
  source 1..21: mol_type = other RNA
aagcggctccacgagcgccag

SEQ ID NO: 5226 - RNA, 21 nt, synthetic construct
  source 1..21: mol_type = other RNA
aagcggttagagtcgagcaac

SEQ ID NO: 5227 - RNA, 21 nt, synthetic construct
  source 1..21: mol_type = other RNA
aaggaacgcgaacccgtagag

SEQ ID NO: 5228 - RNA, 21 nt, synthetic construct
  source 1..21: mol_type = other RNA
aaggaggacgagctgcttcgg

SEQ ID NO: 5229 - RNA, 21 nt, synthetic construct
  source 1..21: mol_type = other RNA
aaggaggtggagcgcgaggtg

SEQ ID NO: 5230 - RNA, 21 nt, synthetic construct
  source 1..21: mol_type = other RNA
aaggcaagaccaaggtgggtg

SEQ ID NO: 5231 - RNA, 21 nt, synthetic construct
  source 1..21: mol_type = other RNA
aaggcgagcgggaagagccac

SEQ ID NO: 5232 - RNA, 21 nt, synthetic construct
  source 1..21: mol_type = other RNA
aaggtgggtgcagatgtgggg

SEQ ID NO: 5233 - RNA, 21 nt, synthetic construct
  source 1..21: mol_type = other RNA
aatacagcaccgcgtccaggc

SEQ ID NO: 5234 - RNA, 21 nt, synthetic construct
  source 1..21: mol_type = other RNA
aatgcttgaacatgtgctcca

SEQ ID NO: 5235 - RNA, 21 nt, synthetic construct
  source 1..21: mol_type = other RNA
acaagccagggccgcgggccc

SEQ ID NO: 5236 - RNA, 21 nt, synthetic construct
  source 1..21: mol_type = other RNA
acaagcggctccacgagcgcc

SEQ ID NO: 5237 - RNA, 21 nt, synthetic construct
  source 1..21: mol_type = other RNA
acaaggaggtggagcgcgagg

SEQ ID NO: 5238 - RNA, 21 nt, synthetic construct
  source 1..21: mol_type = other RNA
acacaagccagggccgcgggc

SEQ ID NO: 5239 - RNA, 21 nt, synthetic construct
  source 1..21: mol_type = other RNA
acaccgctactgcgaggcagg

SEQ ID NO: 5240 - RNA, 21 nt, synthetic construct
  source 1..21: mol_type = other RNA
acagcaccgcgtccaggccgc

SEQ ID NO: 5241 - RNA, 21 nt, synthetic construct
  source 1..21: mol_type = other RNA
acagcgggcgaagcggccagg

SEQ ID NO: 5242 - RNA, 21 nt, synthetic construct
  source 1..21: mol_type = other RNA
acatctgcacccaccttggtc

SEQ ID NO: 5243 - RNA, 21 nt, synthetic construct
  source 1..21: mol_type = other RNA
acatgccagaggctggtggcg

SEQ ID NO: 5244 - RNA, 21 nt, synthetic construct
  source 1..21: mol_type = other RNA
acatgtgctccaagatgcctg

SEQ ID NO: 5245 - RNA, 21 nt, synthetic construct
  source 1..21: mol_type = other RNA
acatgttcaagcattcggagg

SEQ ID NO: 5246 - RNA, 21 nt, synthetic construct
  source 1..21: mol_type = other RNA
accaaggtgggtgcagatgtg

SEQ ID NO: 5247 - RNA, 21 nt, synthetic construct
  source 1..21: mol_type = other RNA
accaatacagcaccgcgtcca

SEQ ID NO: 5248 - RNA, 21 nt, synthetic construct
  source 1..21: mol_type = other RNA
accagacagcgggcgaagcgg

SEQ ID NO: 5249 - RNA, 21 nt, synthetic construct
  source 1..21: mol_type = other RNA
accagcctctggcatgtctcc

SEQ ID NO: 5250 - RNA, 21 nt, synthetic construct
  source 1..21: mol_type = other RNA
accatgcgtcgctgcaccgcc

SEQ ID NO: 5251 - RNA, 21 nt, synthetic construct
  source 1..21: mol_type = other RNA
acccaaccccacatctgcacc

SEQ ID NO: 5252 - RNA, 21 nt, synthetic construct
  source 1..21: mol_type = other RNA
acccaccttggtcttgccttg

SEQ ID NO: 5253 - RNA, 21 nt, synthetic construct
  source 1..21: mol_type = other RNA
accccacatctgcacccacct

SEQ ID NO: 5254 - RNA, 21 nt, synthetic construct
  source 1..21: mol_type = other RNA
accccgcgctgctgcgccact

SEQ ID NO: 5255 - RNA, 21 nt, synthetic construct
  source 1..21: mol_type = other RNA
acccgtagagctggcgcggag

SEQ ID NO: 5256 - RNA, 21 nt, synthetic construct
  source 1..21: mol_type = other RNA
accctggccgcttcgcccgct

SEQ ID NO: 5257 - RNA, 21 nt, synthetic construct
  source 1..21: mol_type = other RNA
accgcctggcccccgtgcagc

SEQ ID NO: 5258 - RNA, 21 nt, synthetic construct
  source 1..21: mol_type = other RNA
accgcgtccaggccgccggcc

SEQ ID NO: 5259 - RNA, 21 nt, synthetic construct
  source 1..21: mol_type = other RNA
accgcgtggcgcgcattgggc

SEQ ID NO: 5260 - RNA, 21 nt, synthetic construct
  source 1..21: mol_type = other RNA
accgctactgcgaggcaggcg

SEQ ID NO: 5261 - RNA, 21 nt, synthetic construct
  source 1..21: mol_type = other RNA
accgcttggaggcgcagtgca

SEQ ID NO: 5262 - RNA, 21 nt, synthetic construct
  source 1..21: mol_type = other RNA
acctccttgttagtcgccaac

SEQ ID NO: 5263 - RNA, 21 nt, synthetic construct
  source 1..21: mol_type = other RNA
acctcgcgctccacctccttg

SEQ ID NO: 5264 - RNA, 21 nt, synthetic construct
  source 1..21: mol_type = other RNA
acctctgcgccgaggctgcca

SEQ ID NO: 5265 - RNA, 21 nt, synthetic construct
  source 1..21: mol_type = other RNA
acctgcagcgcctcgtgccgt

SEQ ID NO: 5266 - RNA, 21 nt, synthetic construct
  source 1..21: mol_type = other RNA
acctggcgaaggaacgcgaac

SEQ ID NO: 5267 - RNA, 21 nt, synthetic construct
  source 1..21: mol_type = other RNA
accttggtcttgccttgcagg

SEQ ID NO: 5268 - RNA, 21 nt, synthetic construct
  source 1..21: mol_type = other RNA
acgacctgcagcgcctcgtgc

SEQ ID NO: 5269 - RNA, 21 nt, synthetic construct
  source 1..21: mol_type = other RNA
acgagcgccagcgtgcccgag

SEQ ID NO: 5270 - RNA, 21 nt, synthetic construct
  source 1..21: mol_type = other RNA
acgagctgcttcggctgcacg

SEQ ID NO: 5271 - RNA, 21 nt, synthetic construct
  source 1..21: mol_type = other RNA
acgaggcgctgcaggtcgtcg

SEQ ID NO: 5272 - RNA, 21 nt, synthetic construct
  source 1..21: mol_type = other RNA
acgcatggtagagaagcgcgc

SEQ ID NO: 5273 - RNA, 21 nt, synthetic construct
  source 1..21: mol_type = other RNA
acgccagcgacacaagccagg

SEQ ID NO: 5274 - RNA, 21 nt, synthetic construct
  source 1..21: mol_type = other RNA
acgcccagcccaatgcgcgcc

SEQ ID NO: 5275 - RNA, 21 nt, synthetic construct
  source 1..21: mol_type = other RNA
acgcctgcctcgcagtagcgg

SEQ ID NO: 5276 - RNA, 21 nt, synthetic construct
  source 1..21: mol_type = other RNA
acgcgaacccgtagagctggc

SEQ ID NO: 5277 - RNA, 21 nt, synthetic construct
  source 1..21: mol_type = other RNA
acgcggtgctgtattggtgcc

SEQ ID NO: 5278 - RNA, 21 nt, synthetic construct
  source 1..21: mol_type = other RNA
acgctccgcgccagctctacg

SEQ ID NO: 5279 - RNA, 21 nt, synthetic construct
  source 1..21: mol_type = other RNA
acgctggcgctcgtggagccg

SEQ ID NO: 5280 - RNA, 21 nt, synthetic construct
  source 1..21: mol_type = other RNA
acggaccccgcgctgctgcgc

SEQ ID NO: 5281 - RNA, 21 nt, synthetic construct
  source 1..21: mol_type = other RNA
acggcacgaggcgctgcaggt

SEQ ID NO: 5282 - RNA, 21 nt, synthetic construct
  source 1..21: mol_type = other RNA
acgggggccaggcggtgcagc

SEQ ID NO: 5283 - RNA, 21 nt, synthetic construct
  source 1..21: mol_type = other RNA
acgggttcgcgttccttcgcc

SEQ ID NO: 5284 - RNA, 21 nt, synthetic construct
  source 1..21: mol_type = other RNA
actaacaaggaggtggagcgc

SEQ ID NO: 5285 - RNA, 21 nt, synthetic construct
  source 1..21: mol_type = other RNA
actcggctgcgcgcttctcta

SEQ ID NO: 5286 - RNA, 21 nt, synthetic construct
  source 1..21: mol_type = other RNA
actctaaccgcttggaggcgc

SEQ ID NO: 5287 - RNA, 21 nt, synthetic construct
  source 1..21: mol_type = other RNA
actgcgaggcaggcgtgcagc

SEQ ID NO: 5288 - RNA, 21 nt, synthetic construct
  source 1..21: mol_type = other RNA
actgcgcctccaagcggttag

SEQ ID NO: 5289 - RNA, 21 nt, synthetic construct
  source 1..21: mol_type = other RNA
actgcgcgctgcacgggggcc

SEQ ID NO: 5290 - RNA, 21 nt, synthetic construct
  source 1..21: mol_type = other RNA
actgcgcgctggcgctgggca

SEQ ID NO: 5291 - RNA, 21 nt, synthetic construct
  source 1..21: mol_type = other RNA
agaaagccccgatgcactgcg

SEQ ID NO: 5292 - RNA, 21 nt, synthetic construct
  source 1..21: mol_type = other RNA
agaagcgcgcagccgagtggc

SEQ ID NO: 5293 - RNA, 21 nt, synthetic construct
  source 1..21: mol_type = other RNA
agaaggcgagcgggaagagcc

SEQ ID NO: 5294 - RNA, 21 nt, synthetic construct
  source 1..21: mol_type = other RNA
agacagcgggcgaagcggcca

SEQ ID NO: 5295 - RNA, 21 nt, synthetic construct
  source 1..21: mol_type = other RNA
agacatgccagaggctggtgg

SEQ ID NO: 5296 - RNA, 21 nt, synthetic construct
  source 1..21: mol_type = other RNA
agaccaaggtgggtgcagatg

SEQ ID NO: 5297 - RNA, 21 nt, synthetic construct
  source 1..21: mol_type = other RNA
agaccgcgtggcgcgcattgg

SEQ ID NO: 5298 - RNA, 21 nt, synthetic construct
  source 1..21: mol_type = other RNA
agagaagcgcgcagccgagtg

SEQ ID NO: 5299 - RNA, 21 nt, synthetic construct
  source 1..21: mol_type = other RNA
agagccactcggctgcgcgct

SEQ ID NO: 5300 - RNA, 21 nt, synthetic construct
  source 1..21: mol_type = other RNA
agagcctgcaaggcaagacca

SEQ ID NO: 5301 - RNA, 21 nt, synthetic construct
  source 1..21: mol_type = other RNA
agagctggcgcggagcgtggc

SEQ ID NO: 5302 - RNA, 21 nt, synthetic construct
  source 1..21: mol_type = other RNA
agaggctggtggcggccggcg

SEQ ID NO: 5303 - RNA, 21 nt, synthetic construct
  source 1..21: mol_type = other RNA
agaggtagaaagccccgatgc

SEQ ID NO: 5304 - RNA, 21 nt, synthetic construct
  source 1..21: mol_type = other RNA
agagtcgagcaacggcacgag

SEQ ID NO: 5305 - RNA, 21 nt, synthetic construct
  source 1..21: mol_type = other RNA
agatgcctgccacgctccgcg

SEQ ID NO: 5306 - RNA, 21 nt, synthetic construct
  source 1..21: mol_type = other RNA
agcaacggcacgaggcgctgc

SEQ ID NO: 5307 - RNA, 21 nt, synthetic construct
  source 1..21: mol_type = other RNA
agcacatgttcaagcattcgg

SEQ ID NO: 5308 - RNA, 21 nt, synthetic construct
  source 1..21: mol_type = other RNA
agcaccgcgtccaggccgccg

SEQ ID NO: 5309 - RNA, 21 nt, synthetic construct
  source 1..21: mol_type = other RNA
agcagcgcggggtccgtgcgg

SEQ ID NO: 5310 - RNA, 21 nt, synthetic construct
  source 1..21: mol_type = other RNA
agcagctcgtcctccttggag

SEQ ID NO: 5311 - RNA, 21 nt, synthetic construct
  source 1..21: mol_type = other RNA
agcattcggaggagacatgcc

SEQ ID NO: 5312 - RNA, 21 nt, synthetic construct
  source 1..21: mol_type = other RNA
agccactcggctgcgcgcttc

SEQ ID NO: 5313 - RNA, 21 nt, synthetic construct
  source 1..21: mol_type = other RNA
agccagggccgcgggcccgac

SEQ ID NO: 5314 - RNA, 21 nt, synthetic construct
  source 1..21: mol_type = other RNA
agccccgatgcactgcgcctc

SEQ ID NO: 5315 - RNA, 21 nt, synthetic construct
  source 1..21: mol_type = other RNA
agccgaagcagctcgtcctcc

SEQ ID NO: 5316 - RNA, 21 nt, synthetic construct
  source 1..21: mol_type = other RNA
agccgagtggctcttcccgct

SEQ ID NO: 5317 - RNA, 21 nt, synthetic construct
  source 1..21: mol_type = other RNA
agccgcttgtggcctcgctgg

SEQ ID NO: 5318 - RNA, 21 nt, synthetic construct
  source 1..21: mol_type = other RNA
agcctcggcgcagaggtagaa

SEQ ID NO: 5319 - RNA, 21 nt, synthetic construct
  source 1..21: mol_type = other RNA
agcctctggcatgtctcctcc

SEQ ID NO: 5320 - RNA, 21 nt, synthetic construct
  source 1..21: mol_type = other RNA
agcctgcaaggcaagaccaag

SEQ ID NO: 5321 - RNA, 21 nt, synthetic construct
  source 1..21: mol_type = other RNA
agcgacacaagccagggccgc

SEQ ID NO: 5322 - RNA, 21 nt, synthetic construct
  source 1..21: mol_type = other RNA
agcgacgcatggtagagaagc

SEQ ID NO: 5323 - RNA, 21 nt, synthetic construct
  source 1..21: mol_type = other RNA
agcgaggccacaagcggctcc

SEQ ID NO: 5324 - RNA, 21 nt, synthetic construct
  source 1..21: mol_type = other RNA
agcgccagcgcgcagtggcgc

SEQ ID NO: 5325 - RNA, 21 nt, synthetic construct
  source 1..21: mol_type = other RNA
agcgccagcgtgcccgagcgc

SEQ ID NO: 5326 - RNA, 21 nt, synthetic construct
  source 1..21: mol_type = other RNA
agcgcctcgtgccgttgctcg

SEQ ID NO: 5327 - RNA, 21 nt, synthetic construct
  source 1..21: mol_type = other RNA
agcgcgaggtggagcgctcgg

SEQ ID NO: 5328 - RNA, 21 nt, synthetic construct
  source 1..21: mol_type = other RNA
agcgcgcagccgagtggctct

SEQ ID NO: 5329 - RNA, 21 nt, synthetic construct
  source 1..21: mol_type = other RNA
agcgcgcagtggcgcagcagc

SEQ ID NO: 5330 - RNA, 21 nt, synthetic construct
  source 1..21: mol_type = other RNA
agcgcgcagttgcccagcgcc

SEQ ID NO: 5331 - RNA, 21 nt, synthetic construct
  source 1..21: mol_type = other RNA
agcgcggggtccgtgcggcgg

SEQ ID NO: 5332 - RNA, 21 nt, synthetic construct
  source 1..21: mol_type = other RNA
agcgctccacctcgcgctcca

SEQ ID NO: 5333 - RNA, 21 nt, synthetic construct
  source 1..21: mol_type = other RNA
agcgctcgggcacgctggcgc

SEQ ID NO: 5334 - RNA, 21 nt, synthetic construct
  source 1..21: mol_type = other RNA
agcggccagggtccagcgagg

SEQ ID NO: 5335 - RNA, 21 nt, synthetic construct
  source 1..21: mol_type = other RNA
agcggctccacgagcgccagc

SEQ ID NO: 5336 - RNA, 21 nt, synthetic construct
  source 1..21: mol_type = other RNA
agcgggaagagccactcggct

SEQ ID NO: 5337 - RNA, 21 nt, synthetic construct
  source 1..21: mol_type = other RNA
agcgggcgaagcggccagggt

SEQ ID NO: 5338 - RNA, 21 nt, synthetic construct
  source 1..21: mol_type = other RNA
agcggtgttggcgactaacaa

SEQ ID NO: 5339 - RNA, 21 nt, synthetic construct
  source 1..21: mol_type = other RNA
agcggttagagtcgagcaacg

SEQ ID NO: 5340 - RNA, 21 nt, synthetic construct
  source 1..21: mol_type = other RNA
agcgtgcccgagcgctccacc

SEQ ID NO: 5341 - RNA, 21 nt, synthetic construct
  source 1..21: mol_type = other RNA
agcgtggcaggcatcttggag

SEQ ID NO: 5342 - RNA, 21 nt, synthetic construct
  source 1..21: mol_type = other RNA
agctcgtcctccttggagaag

SEQ ID NO: 5343 - RNA, 21 nt, synthetic construct
  source 1..21: mol_type = other RNA
agctctacgggttcgcgttcc

SEQ ID NO: 5344 - RNA, 21 nt, synthetic construct
  source 1..21: mol_type = other RNA
agctgcttcggctgcacgcct

SEQ ID NO: 5345 - RNA, 21 nt, synthetic construct
  source 1..21: mol_type = other RNA
agctggcgcggagcgtggcag

SEQ ID NO: 5346 - RNA, 21 nt, synthetic construct
  source 1..21: mol_type = other RNA
aggaacgcgaacccgtagagc

SEQ ID NO: 5347 - RNA, 21 nt, synthetic construct
  source 1..21: mol_type = other RNA
aggacgagctgcttcggctgc

SEQ ID NO: 5348 - RNA, 21 nt, synthetic construct
  source 1..21: mol_type = other RNA
aggagacatgccagaggctgg

SEQ ID NO: 5349 - RNA, 21 nt, synthetic construct
  source 1..21: mol_type = other RNA
aggaggacgagctgcttcggc

SEQ ID NO: 5350 - RNA, 21 nt, synthetic construct
  source 1..21: mol_type = other RNA
aggaggtggagcgcgaggtgg

SEQ ID NO: 5351 - RNA, 21 nt, synthetic construct
  source 1..21: mol_type = other RNA
aggatcacgcccagcccaatg

SEQ ID NO: 5352 - RNA, 21 nt, synthetic construct
  source 1..21: mol_type = other RNA
aggcaagaccaaggtgggtgc

SEQ ID NO: 5353 - RNA, 21 nt, synthetic construct
  source 1..21: mol_type = other RNA
aggcaggcgtgcagccgaagc

SEQ ID NO: 5354 - RNA, 21 nt, synthetic construct
  source 1..21: mol_type = other RNA
aggcatcttggagcacatgtt

SEQ ID NO: 5355 - RNA, 21 nt, synthetic construct
  source 1..21: mol_type = other RNA
aggccacaagcggctccacga

SEQ ID NO: 5356 - RNA, 21 nt, synthetic construct
  source 1..21: mol_type = other RNA
aggccgccggccgccaccagc

SEQ ID NO: 5357 - RNA, 21 nt, synthetic construct
  source 1..21: mol_type = other RNA
aggcgagcgggaagagccact

SEQ ID NO: 5358 - RNA, 21 nt, synthetic construct
  source 1..21: mol_type = other RNA
aggcgcagtgcatcggggctt

SEQ ID NO: 5359 - RNA, 21 nt, synthetic construct
  source 1..21: mol_type = other RNA
aggcgctgcaggtcgtcgggc

SEQ ID NO: 5360 - RNA, 21 nt, synthetic construct
  source 1..21: mol_type = other RNA
aggcggtgcagcgacgcatgg

SEQ ID NO: 5361 - RNA, 21 nt, synthetic construct
  source 1..21: mol_type = other RNA
aggcgtgcagccgaagcagct

SEQ ID NO: 5362 - RNA, 21 nt, synthetic construct
  source 1..21: mol_type = other RNA
aggctcttgatggcagcctcg

SEQ ID NO: 5363 - RNA, 21 nt, synthetic construct
  source 1..21: mol_type = other RNA
aggctgccatcaagagcctgc

SEQ ID NO: 5364 - RNA, 21 nt, synthetic construct
  source 1..21: mol_type = other RNA
aggctggtggcggccggcggc

SEQ ID NO: 5365 - RNA, 21 nt, synthetic construct
  source 1..21: mol_type = other RNA
agggccgcgggcccgacgacc

SEQ ID NO: 5366 - RNA, 21 nt, synthetic construct
  source 1..21: mol_type = other RNA
agggtccagcgaggccacaag

SEQ ID NO: 5367 - RNA, 21 nt, synthetic construct
  source 1..21: mol_type = other RNA
aggtagaaagccccgatgcac

SEQ ID NO: 5368 - RNA, 21 nt, synthetic construct
  source 1..21: mol_type = other RNA
aggtcgtcgggcccgcggccc

SEQ ID NO: 5369 - RNA, 21 nt, synthetic construct
  source 1..21: mol_type = other RNA
aggtggagcgcgaggtggagc

SEQ ID NO: 5370 - RNA, 21 nt, synthetic construct
  source 1..21: mol_type = other RNA
aggtggagcgctcgggcacgc

SEQ ID NO: 5371 - RNA, 21 nt, synthetic construct
  source 1..21: mol_type = other RNA
aggtgggtgcagatgtggggt

SEQ ID NO: 5372 - RNA, 21 nt, synthetic construct
  source 1..21: mol_type = other RNA
aggttcaggatcacgcccagc

SEQ ID NO: 5373 - RNA, 21 nt, synthetic construct
  source 1..21: mol_type = other RNA
agtagcggtgttggcgactaa

SEQ ID NO: 5374 - RNA, 21 nt, synthetic construct
  source 1..21: mol_type = other RNA
agtcgagcaacggcacgaggc

SEQ ID NO: 5375 - RNA, 21 nt, synthetic construct
  source 1..21: mol_type = other RNA
agtcgccaacaccgctactgc

SEQ ID NO: 5376 - RNA, 21 nt, synthetic construct
  source 1..21: mol_type = other RNA
agtgcatcggggctttctacc

SEQ ID NO: 5377 - RNA, 21 nt, synthetic construct
  source 1..21: mol_type = other RNA
agtggcgcagcagcgcggggt

SEQ ID NO: 5378 - RNA, 21 nt, synthetic construct
  source 1..21: mol_type = other RNA
agtggctcttcccgctcgcct

SEQ ID NO: 5379 - RNA, 21 nt, synthetic construct
  source 1..21: mol_type = other RNA
agttgcccagcgccagcgcgc

SEQ ID NO: 5380 - RNA, 21 nt, synthetic construct
  source 1..21: mol_type = other RNA
atacagcaccgcgtccaggcc

SEQ ID NO: 5381 - RNA, 21 nt, synthetic construct
  source 1..21: mol_type = other RNA
atcaagagcctgcaaggcaag

SEQ ID NO: 5382 - RNA, 21 nt, synthetic construct
  source 1..21: mol_type = other RNA
atcacgcccagcccaatgcgc

SEQ ID NO: 5383 - RNA, 21 nt, synthetic construct
  source 1..21: mol_type = other RNA
atccacccaaccccacatctg

SEQ ID NO: 5384 - RNA, 21 nt, synthetic construct
  source 1..21: mol_type = other RNA
atcctgaacctggcgaaggaa

SEQ ID NO: 5385 - RNA, 21 nt, synthetic construct
  source 1..21: mol_type = other RNA
atcggggctttctacctctgc

SEQ ID NO: 5386 - RNA, 21 nt, synthetic construct
  source 1..21: mol_type = other RNA
atctgcacccaccttggtctt

SEQ ID NO: 5387 - RNA, 21 nt, synthetic construct
  source 1..21: mol_type = other RNA
atcttggagcacatgttcaag

SEQ ID NO: 5388 - RNA, 21 nt, synthetic construct
  source 1..21: mol_type = other RNA
atgcactgcgcctccaagcgg

SEQ ID NO: 5389 - RNA, 21 nt, synthetic construct
  source 1..21: mol_type = other RNA
atgccagaggctggtggcggc

SEQ ID NO: 5390 - RNA, 21 nt, synthetic construct
  source 1..21: mol_type = other RNA
atgcctgccacgctccgcgcc

SEQ ID NO: 5391 - RNA, 21 nt, synthetic construct
  source 1..21: mol_type = other RNA
atgcgtcgctgcaccgcctgg

SEQ ID NO: 5392 - RNA, 21 nt, synthetic construct
  source 1..21: mol_type = other RNA
atgcttgaacatgtgctccaa

SEQ ID NO: 5393 - RNA, 21 nt, synthetic construct
  source 1..21: mol_type = other RNA
atggcagcctcggcgcagagg

SEQ ID NO: 5394 - RNA, 21 nt, synthetic construct
  source 1..21: mol_type = other RNA
atggtagagaagcgcgcagcc

SEQ ID NO: 5395 - RNA, 21 nt, synthetic construct
  source 1..21: mol_type = other RNA
atgtctcctccgaatgcttga

SEQ ID NO: 5396 - RNA, 21 nt, synthetic construct
  source 1..21: mol_type = other RNA
atgtgctccaagatgcctgcc

SEQ ID NO: 5397 - RNA, 21 nt, synthetic construct
  source 1..21: mol_type = other RNA
atgttcaagcattcggaggag

SEQ ID NO: 5398 - RNA, 21 nt, synthetic construct
  source 1..21: mol_type = other RNA
attcggaggagacatgccaga

SEQ ID NO: 5399 - RNA, 21 nt, synthetic construct
  source 1..21: mol_type = other RNA
attgggctgggcgtgatcctg

SEQ ID NO: 5400 - RNA, 21 nt, synthetic construct
  source 1..21: mol_type = other RNA
attggtgccgccgcacggacc

SEQ ID NO: 5401 - RNA, 21 nt, synthetic construct
  source 1..21: mol_type = other RNA
caacaccgctactgcgaggca

SEQ ID NO: 5402 - RNA, 21 nt, synthetic construct
  source 1..21: mol_type = other RNA
caaccccacatctgcacccac

SEQ ID NO: 5403 - RNA, 21 nt, synthetic construct
  source 1..21: mol_type = other RNA
caacggcacgaggcgctgcag

SEQ ID NO: 5404 - RNA, 21 nt, synthetic construct
  source 1..21: mol_type = other RNA
caactgcgcgctgcacggggg

SEQ ID NO: 5405 - RNA, 21 nt, synthetic construct
  source 1..21: mol_type = other RNA
caagaccaaggtgggtgcaga

SEQ ID NO: 5406 - RNA, 21 nt, synthetic construct
  source 1..21: mol_type = other RNA
caagagcctgcaaggcaagac

SEQ ID NO: 5407 - RNA, 21 nt, synthetic construct
  source 1..21: mol_type = other RNA
caagatgcctgccacgctccg

SEQ ID NO: 5408 - RNA, 21 nt, synthetic construct
  source 1..21: mol_type = other RNA
caagcattcggaggagacatg

SEQ ID NO: 5409 - RNA, 21 nt, synthetic construct
  source 1..21: mol_type = other RNA
caagccagggccgcgggcccg

SEQ ID NO: 5410 - RNA, 21 nt, synthetic construct
  source 1..21: mol_type = other RNA
caagcggctccacgagcgcca

SEQ ID NO: 5411 - RNA, 21 nt, synthetic construct
  source 1..21: mol_type = other RNA
caagcggttagagtcgagcaa

SEQ ID NO: 5412 - RNA, 21 nt, synthetic construct
  source 1..21: mol_type = other RNA
caaggaggacgagctgcttcg

SEQ ID NO: 5413 - RNA, 21 nt, synthetic construct
  source 1..21: mol_type = other RNA
caaggaggtggagcgcgaggt

SEQ ID NO: 5414 - RNA, 21 nt, synthetic construct
  source 1..21: mol_type = other RNA
caaggcaagaccaaggtgggt

SEQ ID NO: 5415 - RNA, 21 nt, synthetic construct
  source 1..21: mol_type = other RNA
caaggtgggtgcagatgtggg

SEQ ID NO: 5416 - RNA, 21 nt, synthetic construct
  source 1..21: mol_type = other RNA
caatacagcaccgcgtccagg

SEQ ID NO: 5417 - RNA, 21 nt, synthetic construct
  source 1..21: mol_type = other RNA
cacaagccagggccgcgggcc

SEQ ID NO: 5418 - RNA, 21 nt, synthetic construct
  source 1..21: mol_type = other RNA
cacaagcggctccacgagcgc

SEQ ID NO: 5419 - RNA, 21 nt, synthetic construct
  source 1..21: mol_type = other RNA
cacatctgcacccaccttggt

SEQ ID NO: 5420 - RNA, 21 nt, synthetic construct
  source 1..21: mol_type = other RNA
cacatgttcaagcattcggag

SEQ ID NO: 5421 - RNA, 21 nt, synthetic construct
  source 1..21: mol_type = other RNA
caccaatacagcaccgcgtcc

SEQ ID NO: 5422 - RNA, 21 nt, synthetic construct
  source 1..21: mol_type = other RNA
caccagacagcgggcgaagcg

SEQ ID NO: 5423 - RNA, 21 nt, synthetic construct
  source 1..21: mol_type = other RNA
caccagcctctggcatgtctc

SEQ ID NO: 5424 - RNA, 21 nt, synthetic construct
  source 1..21: mol_type = other RNA
cacccaaccccacatctgcac

SEQ ID NO: 5425 - RNA, 21 nt, synthetic construct
  source 1..21: mol_type = other RNA
cacccaccttggtcttgcctt

SEQ ID NO: 5426 - RNA, 21 nt, synthetic construct
  source 1..21: mol_type = other RNA
caccgcctggcccccgtgcag

SEQ ID NO: 5427 - RNA, 21 nt, synthetic construct
  source 1..21: mol_type = other RNA
caccgcgtccaggccgccggc

SEQ ID NO: 5428 - RNA, 21 nt, synthetic construct
  source 1..21: mol_type = other RNA
caccgctactgcgaggcaggc

SEQ ID NO: 5429 - RNA, 21 nt, synthetic construct
  source 1..21: mol_type = other RNA
cacctccttgttagtcgccaa

SEQ ID NO: 5430 - RNA, 21 nt, synthetic construct
  source 1..21: mol_type = other RNA
cacctcgcgctccacctcctt

SEQ ID NO: 5431 - RNA, 21 nt, synthetic construct
  source 1..21: mol_type = other RNA
caccttggtcttgccttgcag

SEQ ID NO: 5432 - RNA, 21 nt, synthetic construct
  source 1..21: mol_type = other RNA
cacgagcgccagcgtgcccga

SEQ ID NO: 5433 - RNA, 21 nt, synthetic construct
  source 1..21: mol_type = other RNA
cacgaggcgctgcaggtcgtc

SEQ ID NO: 5434 - RNA, 21 nt, synthetic construct
  source 1..21: mol_type = other RNA
cacgcccagcccaatgcgcgc

SEQ ID NO: 5435 - RNA, 21 nt, synthetic construct
  source 1..21: mol_type = other RNA
cacgcctgcctcgcagtagcg

SEQ ID NO: 5436 - RNA, 21 nt, synthetic construct
  source 1..21: mol_type = other RNA
cacgctccgcgccagctctac

SEQ ID NO: 5437 - RNA, 21 nt, synthetic construct
  source 1..21: mol_type = other RNA
cacgctggcgctcgtggagcc

SEQ ID NO: 5438 - RNA, 21 nt, synthetic construct
  source 1..21: mol_type = other RNA
cacggaccccgcgctgctgcg

SEQ ID NO: 5439 - RNA, 21 nt, synthetic construct
  source 1..21: mol_type = other RNA
cacgggggccaggcggtgcag

SEQ ID NO: 5440 - RNA, 21 nt, synthetic construct
  source 1..21: mol_type = other RNA
cactcggctgcgcgcttctct

SEQ ID NO: 5441 - RNA, 21 nt, synthetic construct
  source 1..21: mol_type = other RNA
cactgcgcctccaagcggtta

SEQ ID NO: 5442 - RNA, 21 nt, synthetic construct
  source 1..21: mol_type = other RNA
cactgcgcgctggcgctgggc

SEQ ID NO: 5443 - RNA, 21 nt, synthetic construct
  source 1..21: mol_type = other RNA
cagacagcgggcgaagcggcc

SEQ ID NO: 5444 - RNA, 21 nt, synthetic construct
  source 1..21: mol_type = other RNA
cagaggctggtggcggccggc

SEQ ID NO: 5445 - RNA, 21 nt, synthetic construct
  source 1..21: mol_type = other RNA
cagaggtagaaagccccgatg

SEQ ID NO: 5446 - RNA, 21 nt, synthetic construct
  source 1..21: mol_type = other RNA
cagcaccgcgtccaggccgcc

SEQ ID NO: 5447 - RNA, 21 nt, synthetic construct
  source 1..21: mol_type = other RNA
cagcagcgcggggtccgtgcg

SEQ ID NO: 5448 - RNA, 21 nt, synthetic construct
  source 1..21: mol_type = other RNA
cagccgaagcagctcgtcctc

SEQ ID NO: 5449 - RNA, 21 nt, synthetic construct
  source 1..21: mol_type = other RNA
cagccgagtggctcttcccgc

SEQ ID NO: 5450 - RNA, 21 nt, synthetic construct
  source 1..21: mol_type = other RNA
cagcctcggcgcagaggtaga

SEQ ID NO: 5451 - RNA, 21 nt, synthetic construct
  source 1..21: mol_type = other RNA
cagcctctggcatgtctcctc

SEQ ID NO: 5452 - RNA, 21 nt, synthetic construct
  source 1..21: mol_type = other RNA
cagcgacacaagccagggccg

SEQ ID NO: 5453 - RNA, 21 nt, synthetic construct
  source 1..21: mol_type = other RNA
cagcgacgcatggtagagaag

SEQ ID NO: 5454 - RNA, 21 nt, synthetic construct
  source 1..21: mol_type = other RNA
cagcgaggccacaagcggctc

SEQ ID NO: 5455 - RNA, 21 nt, synthetic construct
  source 1..21: mol_type = other RNA
cagcgccagcgcgcagtggcg

SEQ ID NO: 5456 - RNA, 21 nt, synthetic construct
  source 1..21: mol_type = other RNA
cagcgcctcgtgccgttgctc

SEQ ID NO: 5457 - RNA, 21 nt, synthetic construct
  source 1..21: mol_type = other RNA
cagcgcgcagtggcgcagcag

SEQ ID NO: 5458 - RNA, 21 nt, synthetic construct
  source 1..21: mol_type = other RNA
cagcgcgcagttgcccagcgc

SEQ ID NO: 5459 - RNA, 21 nt, synthetic construct
  source 1..21: mol_type = other RNA
cagcgcggggtccgtgcggcg

SEQ ID NO: 5460 - RNA, 21 nt, synthetic construct
  source 1..21: mol_type = other RNA
cagcgggcgaagcggccaggg

SEQ ID NO: 5461 - RNA, 21 nt, synthetic construct
  source 1..21: mol_type = other RNA
cagcgtgcccgagcgctccac

SEQ ID NO: 5462 - RNA, 21 nt, synthetic construct
  source 1..21: mol_type = other RNA
cagctcgtcctccttggagaa

SEQ ID NO: 5463 - RNA, 21 nt, synthetic construct
  source 1..21: mol_type = other RNA
cagctctacgggttcgcgttc

SEQ ID NO: 5464 - RNA, 21 nt, synthetic construct
  source 1..21: mol_type = other RNA
caggatcacgcccagcccaat

SEQ ID NO: 5465 - RNA, 21 nt, synthetic construct
  source 1..21: mol_type = other RNA
caggcatcttggagcacatgt

SEQ ID NO: 5466 - RNA, 21 nt, synthetic construct
  source 1..21: mol_type = other RNA
caggccgccggccgccaccag

SEQ ID NO: 5467 - RNA, 21 nt, synthetic construct
  source 1..21: mol_type = other RNA
caggcggtgcagcgacgcatg

SEQ ID NO: 5468 - RNA, 21 nt, synthetic construct
  source 1..21: mol_type = other RNA
caggcgtgcagccgaagcagc

SEQ ID NO: 5469 - RNA, 21 nt, synthetic construct
  source 1..21: mol_type = other RNA
caggctcttgatggcagcctc

SEQ ID NO: 5470 - RNA, 21 nt, synthetic construct
  source 1..21: mol_type = other RNA
cagggccgcgggcccgacgac

SEQ ID NO: 5471 - RNA, 21 nt, synthetic construct
  source 1..21: mol_type = other RNA
cagggtccagcgaggccacaa

SEQ ID NO: 5472 - RNA, 21 nt, synthetic construct
  source 1..21: mol_type = other RNA
caggtcgtcgggcccgcggcc

SEQ ID NO: 5473 - RNA, 21 nt, synthetic construct
  source 1..21: mol_type = other RNA
caggttcaggatcacgcccag

SEQ ID NO: 5474 - RNA, 21 nt, synthetic construct
  source 1..21: mol_type = other RNA
cagtagcggtgttggcgacta

SEQ ID NO: 5475 - RNA, 21 nt, synthetic construct
  source 1..21: mol_type = other RNA
cagtgcatcggggctttctac

SEQ ID NO: 5476 - RNA, 21 nt, synthetic construct
  source 1..21: mol_type = other RNA
cagtggcgcagcagcgcgggg

SEQ ID NO: 5477 - RNA, 21 nt, synthetic construct
  source 1..21: mol_type = other RNA
cagttgcccagcgccagcgcg

SEQ ID NO: 5478 - RNA, 21 nt, synthetic construct
  source 1..21: mol_type = other RNA
catcaagagcctgcaaggcaa

SEQ ID NO: 5479 - RNA, 21 nt, synthetic construct
  source 1..21: mol_type = other RNA
catcggggctttctacctctg

SEQ ID NO: 5480 - RNA, 21 nt, synthetic construct
  source 1..21: mol_type = other RNA
catctgcacccaccttggtct

SEQ ID NO: 5481 - RNA, 21 nt, synthetic construct
  source 1..21: mol_type = other RNA
catcttggagcacatgttcaa

SEQ ID NO: 5482 - RNA, 21 nt, synthetic construct
  source 1..21: mol_type = other RNA
catgccagaggctggtggcgg

SEQ ID NO: 5483 - RNA, 21 nt, synthetic construct
  source 1..21: mol_type = other RNA
catgcgtcgctgcaccgcctg

SEQ ID NO: 5484 - RNA, 21 nt, synthetic construct
  source 1..21: mol_type = other RNA
catggtagagaagcgcgcagc

SEQ ID NO: 5485 - RNA, 21 nt, synthetic construct
  source 1..21: mol_type = other RNA
catgtctcctccgaatgcttg

SEQ ID NO: 5486 - RNA, 21 nt, synthetic construct
  source 1..21: mol_type = other RNA
catgtgctccaagatgcctgc

SEQ ID NO: 5487 - RNA, 21 nt, synthetic construct
  source 1..21: mol_type = other RNA
catgttcaagcattcggagga

SEQ ID NO: 5488 - RNA, 21 nt, synthetic construct
  source 1..21: mol_type = other RNA
cattcggaggagacatgccag

SEQ ID NO: 5489 - RNA, 21 nt, synthetic construct
  source 1..21: mol_type = other RNA
cattgggctgggcgtgatcct

SEQ ID NO: 5490 - RNA, 21 nt, synthetic construct
  source 1..21: mol_type = other RNA
ccaacaccgctactgcgaggc

SEQ ID NO: 5491 - RNA, 21 nt, synthetic construct
  source 1..21: mol_type = other RNA
ccaaccccacatctgcaccca

SEQ ID NO: 5492 - RNA, 21 nt, synthetic construct
  source 1..21: mol_type = other RNA
ccaagatgcctgccacgctcc

SEQ ID NO: 5493 - RNA, 21 nt, synthetic construct
  source 1..21: mol_type = other RNA
ccaagcggttagagtcgagca

SEQ ID NO: 5494 - RNA, 21 nt, synthetic construct
  source 1..21: mol_type = other RNA
ccaaggaggacgagctgcttc

SEQ ID NO: 5495 - RNA, 21 nt, synthetic construct
  source 1..21: mol_type = other RNA
ccaaggtgggtgcagatgtgg

SEQ ID NO: 5496 - RNA, 21 nt, synthetic construct
  source 1..21: mol_type = other RNA
ccaatacagcaccgcgtccag

SEQ ID NO: 5497 - RNA, 21 nt, synthetic construct
  source 1..21: mol_type = other RNA
ccacaagcggctccacgagcg

SEQ ID NO: 5498 - RNA, 21 nt, synthetic construct
  source 1..21: mol_type = other RNA
ccacatctgcacccaccttgg

SEQ ID NO: 5499 - RNA, 21 nt, synthetic construct
  source 1..21: mol_type = other RNA
ccaccagacagcgggcgaagc

SEQ ID NO: 5500 - RNA, 21 nt, synthetic construct
  source 1..21: mol_type = other RNA
ccaccagcctctggcatgtct

SEQ ID NO: 5501 - RNA, 21 nt, synthetic construct
  source 1..21: mol_type = other RNA
ccacccaaccccacatctgca

SEQ ID NO: 5502 - RNA, 21 nt, synthetic construct
  source 1..21: mol_type = other RNA
ccacctccttgttagtcgcca

SEQ ID NO: 5503 - RNA, 21 nt, synthetic construct
  source 1..21: mol_type = other RNA
ccacctcgcgctccacctcct

SEQ ID NO: 5504 - RNA, 21 nt, synthetic construct
  source 1..21: mol_type = other RNA
ccaccttggtcttgccttgca

SEQ ID NO: 5505 - RNA, 21 nt, synthetic construct
  source 1..21: mol_type = other RNA
ccacgagcgccagcgtgcccg

SEQ ID NO: 5506 - RNA, 21 nt, synthetic construct
  source 1..21: mol_type = other RNA
ccacgctccgcgccagctcta

SEQ ID NO: 5507 - RNA, 21 nt, synthetic construct
  source 1..21: mol_type = other RNA
ccactcggctgcgcgcttctc

SEQ ID NO: 5508 - RNA, 21 nt, synthetic construct
  source 1..21: mol_type = other RNA
ccactgcgcgctggcgctggg

SEQ ID NO: 5509 - RNA, 21 nt, synthetic construct
  source 1..21: mol_type = other RNA
ccagacagcgggcgaagcggc

SEQ ID NO: 5510 - RNA, 21 nt, synthetic construct
  source 1..21: mol_type = other RNA
ccagaggctggtggcggccgg

SEQ ID NO: 5511 - RNA, 21 nt, synthetic construct
  source 1..21: mol_type = other RNA
ccagcctctggcatgtctcct

SEQ ID NO: 5512 - RNA, 21 nt, synthetic construct
  source 1..21: mol_type = other RNA
ccagcgacacaagccagggcc

SEQ ID NO: 5513 - RNA, 21 nt, synthetic construct
  source 1..21: mol_type = other RNA
ccagcgaggccacaagcggct

SEQ ID NO: 5514 - RNA, 21 nt, synthetic construct
  source 1..21: mol_type = other RNA
ccagcgccagcgcgcagtggc

SEQ ID NO: 5515 - RNA, 21 nt, synthetic construct
  source 1..21: mol_type = other RNA
ccagcgcgcagtggcgcagca

SEQ ID NO: 5516 - RNA, 21 nt, synthetic construct
  source 1..21: mol_type = other RNA
ccagcgtgcccgagcgctcca

SEQ ID NO: 5517 - RNA, 21 nt, synthetic construct
  source 1..21: mol_type = other RNA
ccagctctacgggttcgcgtt

SEQ ID NO: 5518 - RNA, 21 nt, synthetic construct
  source 1..21: mol_type = other RNA
ccaggccgccggccgccacca

SEQ ID NO: 5519 - RNA, 21 nt, synthetic construct
  source 1..21: mol_type = other RNA
ccaggcggtgcagcgacgcat

SEQ ID NO: 5520 - RNA, 21 nt, synthetic construct
  source 1..21: mol_type = other RNA
ccagggccgcgggcccgacga

SEQ ID NO: 5521 - RNA, 21 nt, synthetic construct
  source 1..21: mol_type = other RNA
ccagggtccagcgaggccaca

SEQ ID NO: 5522 - RNA, 21 nt, synthetic construct
  source 1..21: mol_type = other RNA
ccaggttcaggatcacgccca

SEQ ID NO: 5523 - RNA, 21 nt, synthetic construct
  source 1..21: mol_type = other RNA
ccatcaagagcctgcaaggca

SEQ ID NO: 5524 - RNA, 21 nt, synthetic construct
  source 1..21: mol_type = other RNA
ccatgcgtcgctgcaccgcct

SEQ ID NO: 5525 - RNA, 21 nt, synthetic construct
  source 1..21: mol_type = other RNA
cccaaccccacatctgcaccc

SEQ ID NO: 5526 - RNA, 21 nt, synthetic construct
  source 1..21: mol_type = other RNA
cccacatctgcacccaccttg

SEQ ID NO: 5527 - RNA, 21 nt, synthetic construct
  source 1..21: mol_type = other RNA
cccaccttggtcttgccttgc

SEQ ID NO: 5528 - RNA, 21 nt, synthetic construct
  source 1..21: mol_type = other RNA
cccagcgccagcgcgcagtgg

SEQ ID NO: 5529 - RNA, 21 nt, synthetic construct
  source 1..21: mol_type = other RNA
ccccacatctgcacccacctt

SEQ ID NO: 5530 - RNA, 21 nt, synthetic construct
  source 1..21: mol_type = other RNA
cccccgtgcagcgcgcagttg

SEQ ID NO: 5531 - RNA, 21 nt, synthetic construct
  source 1..21: mol_type = other RNA
ccccgatgcactgcgcctcca

SEQ ID NO: 5532 - RNA, 21 nt, synthetic construct
  source 1..21: mol_type = other RNA
ccccgcgctgctgcgccactg

SEQ ID NO: 5533 - RNA, 21 nt, synthetic construct
  source 1..21: mol_type = other RNA
ccccgtgcagcgcgcagttgc

SEQ ID NO: 5534 - RNA, 21 nt, synthetic construct
  source 1..21: mol_type = other RNA
cccgacgacctgcagcgcctc

SEQ ID NO: 5535 - RNA, 21 nt, synthetic construct
  source 1..21: mol_type = other RNA
cccgagcgctccacctcgcgc

SEQ ID NO: 5536 - RNA, 21 nt, synthetic construct
  source 1..21: mol_type = other RNA
cccgatgcactgcgcctccaa

SEQ ID NO: 5537 - RNA, 21 nt, synthetic construct
  source 1..21: mol_type = other RNA
cccgcgctgctgcgccactgc

SEQ ID NO: 5538 - RNA, 21 nt, synthetic construct
  source 1..21: mol_type = other RNA
cccgcggccctggcttgtgtc

SEQ ID NO: 5539 - RNA, 21 nt, synthetic construct
  source 1..21: mol_type = other RNA
cccgctcgccttctccaagga

SEQ ID NO: 5540 - RNA, 21 nt, synthetic construct
  source 1..21: mol_type = other RNA
cccgctgtctggtggacgcca

SEQ ID NO: 5541 - RNA, 21 nt, synthetic construct
  source 1..21: mol_type = other RNA
cccgtagagctggcgcggagc

SEQ ID NO: 5542 - RNA, 21 nt, synthetic construct
  source 1..21: mol_type = other RNA
cccgtgcagcgcgcagttgcc

SEQ ID NO: 5543 - RNA, 21 nt, synthetic construct
  source 1..21: mol_type = other RNA
ccctggccgcttcgcccgctg

SEQ ID NO: 5544 - RNA, 21 nt, synthetic construct
  source 1..21: mol_type = other RNA
ccctggcttgtgtcgctggcg

SEQ ID NO: 5545 - RNA, 21 nt, synthetic construct
  source 1..21: mol_type = other RNA
ccgaagcagctcgtcctcctt

SEQ ID NO: 5546 - RNA, 21 nt, synthetic construct
  source 1..21: mol_type = other RNA
ccgaatgcttgaacatgtgct

SEQ ID NO: 5547 - RNA, 21 nt, synthetic construct
  source 1..21: mol_type = other RNA
ccgacgacctgcagcgcctcg

SEQ ID NO: 5548 - RNA, 21 nt, synthetic construct
  source 1..21: mol_type = other RNA
ccgagcgctccacctcgcgct

SEQ ID NO: 5549 - RNA, 21 nt, synthetic construct
  source 1..21: mol_type = other RNA
ccgaggctgccatcaagagcc

SEQ ID NO: 5550 - RNA, 21 nt, synthetic construct
  source 1..21: mol_type = other RNA
ccgagtggctcttcccgctcg

SEQ ID NO: 5551 - RNA, 21 nt, synthetic construct
  source 1..21: mol_type = other RNA
ccgatgcactgcgcctccaag

SEQ ID NO: 5552 - RNA, 21 nt, synthetic construct
  source 1..21: mol_type = other RNA
ccgcacggaccccgcgctgct

SEQ ID NO: 5553 - RNA, 21 nt, synthetic construct
  source 1..21: mol_type = other RNA
ccgccaccagcctctggcatg

SEQ ID NO: 5554 - RNA, 21 nt, synthetic construct
  source 1..21: mol_type = other RNA
ccgccgcacggaccccgcgct

SEQ ID NO: 5555 - RNA, 21 nt, synthetic construct
  source 1..21: mol_type = other RNA
ccgccggccgccaccagcctc

SEQ ID NO: 5556 - RNA, 21 nt, synthetic construct
  source 1..21: mol_type = other RNA
ccgcctggcccccgtgcagcg

SEQ ID NO: 5557 - RNA, 21 nt, synthetic construct
  source 1..21: mol_type = other RNA
ccgcgccagctctacgggttc

SEQ ID NO: 5558 - RNA, 21 nt, synthetic construct
  source 1..21: mol_type = other RNA
ccgcgctgctgcgccactgcg

SEQ ID NO: 5559 - RNA, 21 nt, synthetic construct
  source 1..21: mol_type = other RNA
ccgcggccctggcttgtgtcg

SEQ ID NO: 5560 - RNA, 21 nt, synthetic construct
  source 1..21: mol_type = other RNA
ccgcgggcccgacgacctgca

SEQ ID NO: 5561 - RNA, 21 nt, synthetic construct
  source 1..21: mol_type = other RNA
ccgcgtccaggccgccggccg

SEQ ID NO: 5562 - RNA, 21 nt, synthetic construct
  source 1..21: mol_type = other RNA
ccgcgtggcgcgcattgggct

SEQ ID NO: 5563 - RNA, 21 nt, synthetic construct
  source 1..21: mol_type = other RNA
ccgctactgcgaggcaggcgt

SEQ ID NO: 5564 - RNA, 21 nt, synthetic construct
  source 1..21: mol_type = other RNA
ccgctcgccttctccaaggag

SEQ ID NO: 5565 - RNA, 21 nt, synthetic construct
  source 1..21: mol_type = other RNA
ccgctgtctggtggacgccag

SEQ ID NO: 5566 - RNA, 21 nt, synthetic construct
  source 1..21: mol_type = other RNA
ccgcttcgcccgctgtctggt

SEQ ID NO: 5567 - RNA, 21 nt, synthetic construct
  source 1..21: mol_type = other RNA
ccgcttggaggcgcagtgcat

SEQ ID NO: 5568 - RNA, 21 nt, synthetic construct
  source 1..21: mol_type = other RNA
ccgcttgtggcctcgctggac

SEQ ID NO: 5569 - RNA, 21 nt, synthetic construct
  source 1..21: mol_type = other RNA
ccggccgccaccagcctctgg

SEQ ID NO: 5570 - RNA, 21 nt, synthetic construct
  source 1..21: mol_type = other RNA
ccggcggcctggacgcggtgc

SEQ ID NO: 5571 - RNA, 21 nt, synthetic construct
  source 1..21: mol_type = other RNA
ccgtagagctggcgcggagcg

SEQ ID NO: 5572 - RNA, 21 nt, synthetic construct
  source 1..21: mol_type = other RNA
ccgtgcagcgcgcagttgccc

SEQ ID NO: 5573 - RNA, 21 nt, synthetic construct
  source 1..21: mol_type = other RNA
ccgtgcggcggcaccaataca

SEQ ID NO: 5574 - RNA, 21 nt, synthetic construct
  source 1..21: mol_type = other RNA
ccgttgctcgactctaaccgc

SEQ ID NO: 5575 - RNA, 21 nt, synthetic construct
  source 1..21: mol_type = other RNA
cctccaagcggttagagtcga

SEQ ID NO: 5576 - RNA, 21 nt, synthetic construct
  source 1..21: mol_type = other RNA
cctccgaatgcttgaacatgt

SEQ ID NO: 5577 - RNA, 21 nt, synthetic construct
  source 1..21: mol_type = other RNA
cctccttggagaaggcgagcg

SEQ ID NO: 5578 - RNA, 21 nt, synthetic construct
  source 1..21: mol_type = other RNA
cctccttgttagtcgccaaca

SEQ ID NO: 5579 - RNA, 21 nt, synthetic construct
  source 1..21: mol_type = other RNA
cctcgcagtagcggtgttggc

SEQ ID NO: 5580 - RNA, 21 nt, synthetic construct
  source 1..21: mol_type = other RNA
cctcgcgctccacctccttgt

SEQ ID NO: 5581 - RNA, 21 nt, synthetic construct
  source 1..21: mol_type = other RNA
cctcgctggaccctggccgct

SEQ ID NO: 5582 - RNA, 21 nt, synthetic construct
  source 1..21: mol_type = other RNA
cctcggcgcagaggtagaaag

SEQ ID NO: 5583 - RNA, 21 nt, synthetic construct
  source 1..21: mol_type = other RNA
cctcgtgccgttgctcgactc

SEQ ID NO: 5584 - RNA, 21 nt, synthetic construct
  source 1..21: mol_type = other RNA
cctctgcgccgaggctgccat

SEQ ID NO: 5585 - RNA, 21 nt, synthetic construct
  source 1..21: mol_type = other RNA
cctctggcatgtctcctccga

SEQ ID NO: 5586 - RNA, 21 nt, synthetic construct
  source 1..21: mol_type = other RNA
cctgaacctggcgaaggaacg

SEQ ID NO: 5587 - RNA, 21 nt, synthetic construct
  source 1..21: mol_type = other RNA
cctgcaaggcaagaccaaggt

SEQ ID NO: 5588 - RNA, 21 nt, synthetic construct
  source 1..21: mol_type = other RNA
cctgcagcgcctcgtgccgtt

SEQ ID NO: 5589 - RNA, 21 nt, synthetic construct
  source 1..21: mol_type = other RNA
cctgccacgctccgcgccagc

SEQ ID NO: 5590 - RNA, 21 nt, synthetic construct
  source 1..21: mol_type = other RNA
cctgcctcgcagtagcggtgt

SEQ ID NO: 5591 - RNA, 21 nt, synthetic construct
  source 1..21: mol_type = other RNA
cctggacgcggtgctgtattg

SEQ ID NO: 5592 - RNA, 21 nt, synthetic construct
  source 1..21: mol_type = other RNA
cctggcccccgtgcagcgcgc

SEQ ID NO: 5593 - RNA, 21 nt, synthetic construct
  source 1..21: mol_type = other RNA
cctggccgcttcgcccgctgt

SEQ ID NO: 5594 - RNA, 21 nt, synthetic construct
  source 1..21: mol_type = other RNA
cctggcgaaggaacgcgaacc

SEQ ID NO: 5595 - RNA, 21 nt, synthetic construct
  source 1..21: mol_type = other RNA
cctggcttgtgtcgctggcgt

SEQ ID NO: 5596 - RNA, 21 nt, synthetic construct
  source 1..21: mol_type = other RNA
ccttcgccaggttcaggatca

SEQ ID NO: 5597 - RNA, 21 nt, synthetic construct
  source 1..21: mol_type = other RNA
ccttctccaaggaggacgagc

SEQ ID NO: 5598 - RNA, 21 nt, synthetic construct
  source 1..21: mol_type = other RNA
ccttgcaggctcttgatggca

SEQ ID NO: 5599 - RNA, 21 nt, synthetic construct
  source 1..21: mol_type = other RNA
ccttggagaaggcgagcggga

SEQ ID NO: 5600 - RNA, 21 nt, synthetic construct
  source 1..21: mol_type = other RNA
ccttggtcttgccttgcaggc

SEQ ID NO: 5601 - RNA, 21 nt, synthetic construct
  source 1..21: mol_type = other RNA
ccttgttagtcgccaacaccg

SEQ ID NO: 5602 - RNA, 21 nt, synthetic construct
  source 1..21: mol_type = other RNA
cgaacccgtagagctggcgcg

SEQ ID NO: 5603 - RNA, 21 nt, synthetic construct
  source 1..21: mol_type = other RNA
cgaagcagctcgtcctccttg

SEQ ID NO: 5604 - RNA, 21 nt, synthetic construct
  source 1..21: mol_type = other RNA
cgaagcggccagggtccagcg

SEQ ID NO: 5605 - RNA, 21 nt, synthetic construct
  source 1..21: mol_type = other RNA
cgaaggaacgcgaacccgtag

SEQ ID NO: 5606 - RNA, 21 nt, synthetic construct
  source 1..21: mol_type = other RNA
cgaatgcttgaacatgtgctc

SEQ ID NO: 5607 - RNA, 21 nt, synthetic construct
  source 1..21: mol_type = other RNA
cgacacaagccagggccgcgg

SEQ ID NO: 5608 - RNA, 21 nt, synthetic construct
  source 1..21: mol_type = other RNA
cgacctgcagcgcctcgtgcc

SEQ ID NO: 5609 - RNA, 21 nt, synthetic construct
  source 1..21: mol_type = other RNA
cgacgacctgcagcgcctcgt

SEQ ID NO: 5610 - RNA, 21 nt, synthetic construct
  source 1..21: mol_type = other RNA
cgacgcatggtagagaagcgc

SEQ ID NO: 5611 - RNA, 21 nt, synthetic construct
  source 1..21: mol_type = other RNA
cgactaacaaggaggtggagc

SEQ ID NO: 5612 - RNA, 21 nt, synthetic construct
  source 1..21: mol_type = other RNA
cgactctaaccgcttggaggc

SEQ ID NO: 5613 - RNA, 21 nt, synthetic construct
  source 1..21: mol_type = other RNA
cgagcaacggcacgaggcgct

SEQ ID NO: 5614 - RNA, 21 nt, synthetic construct
  source 1..21: mol_type = other RNA
cgagcgccagcgtgcccgagc

SEQ ID NO: 5615 - RNA, 21 nt, synthetic construct
  source 1..21: mol_type = other RNA
cgagcgctccacctcgcgctc

SEQ ID NO: 5616 - RNA, 21 nt, synthetic construct
  source 1..21: mol_type = other RNA
cgagcgggaagagccactcgg

SEQ ID NO: 5617 - RNA, 21 nt, synthetic construct
  source 1..21: mol_type = other RNA
cgagctgcttcggctgcacgc

SEQ ID NO: 5618 - RNA, 21 nt, synthetic construct
  source 1..21: mol_type = other RNA
cgaggcaggcgtgcagccgaa

SEQ ID NO: 5619 - RNA, 21 nt, synthetic construct
  source 1..21: mol_type = other RNA
cgaggccacaagcggctccac

SEQ ID NO: 5620 - RNA, 21 nt, synthetic construct
  source 1..21: mol_type = other RNA
cgaggcgctgcaggtcgtcgg

SEQ ID NO: 5621 - RNA, 21 nt, synthetic construct
  source 1..21: mol_type = other RNA
cgaggctgccatcaagagcct

SEQ ID NO: 5622 - RNA, 21 nt, synthetic construct
  source 1..21: mol_type = other RNA
cgaggtggagcgctcgggcac

SEQ ID NO: 5623 - RNA, 21 nt, synthetic construct
  source 1..21: mol_type = other RNA
cgagtggctcttcccgctcgc

SEQ ID NO: 5624 - RNA, 21 nt, synthetic construct
  source 1..21: mol_type = other RNA
cgatgcactgcgcctccaagc

SEQ ID NO: 5625 - RNA, 21 nt, synthetic construct
  source 1..21: mol_type = other RNA
cgcacggaccccgcgctgctg

SEQ ID NO: 5626 - RNA, 21 nt, synthetic construct
  source 1..21: mol_type = other RNA
cgcagaggtagaaagccccga

SEQ ID NO: 5627 - RNA, 21 nt, synthetic construct
  source 1..21: mol_type = other RNA
cgcagcagcgcggggtccgtg

SEQ ID NO: 5628 - RNA, 21 nt, synthetic construct
  source 1..21: mol_type = other RNA
cgcagccgagtggctcttccc

SEQ ID NO: 5629 - RNA, 21 nt, synthetic construct
  source 1..21: mol_type = other RNA
cgcagtagcggtgttggcgac

SEQ ID NO: 5630 - RNA, 21 nt, synthetic construct
  source 1..21: mol_type = other RNA
cgcagtgcatcggggctttct

SEQ ID NO: 5631 - RNA, 21 nt, synthetic construct
  source 1..21: mol_type = other RNA
cgcagtggcgcagcagcgcgg

SEQ ID NO: 5632 - RNA, 21 nt, synthetic construct
  source 1..21: mol_type = other RNA
cgcagttgcccagcgccagcg

SEQ ID NO: 5633 - RNA, 21 nt, synthetic construct
  source 1..21: mol_type = other RNA
cgcatggtagagaagcgcgca

SEQ ID NO: 5634 - RNA, 21 nt, synthetic construct
  source 1..21: mol_type = other RNA
cgcattgggctgggcgtgatc

SEQ ID NO: 5635 - RNA, 21 nt, synthetic construct
  source 1..21: mol_type = other RNA
cgccaacaccgctactgcgag

SEQ ID NO: 5636 - RNA, 21 nt, synthetic construct
  source 1..21: mol_type = other RNA
cgccaccagcctctggcatgt

SEQ ID NO: 5637 - RNA, 21 nt, synthetic construct
  source 1..21: mol_type = other RNA
cgccactgcgcgctggcgctg

SEQ ID NO: 5638 - RNA, 21 nt, synthetic construct
  source 1..21: mol_type = other RNA
cgccagcgacacaagccaggg

SEQ ID NO: 5639 - RNA, 21 nt, synthetic construct
  source 1..21: mol_type = other RNA
cgccagcgcgcagtggcgcag

SEQ ID NO: 5640 - RNA, 21 nt, synthetic construct
  source 1..21: mol_type = other RNA
cgccagcgtgcccgagcgctc

SEQ ID NO: 5641 - RNA, 21 nt, synthetic construct
  source 1..21: mol_type = other RNA
cgccagctctacgggttcgcg

SEQ ID NO: 5642 - RNA, 21 nt, synthetic construct
  source 1..21: mol_type = other RNA
cgccaggttcaggatcacgcc

SEQ ID NO: 5643 - RNA, 21 nt, synthetic construct
  source 1..21: mol_type = other RNA
cgcccagcccaatgcgcgcca

SEQ ID NO: 5644 - RNA, 21 nt, synthetic construct
  source 1..21: mol_type = other RNA
cgcccgctgtctggtggacgc

SEQ ID NO: 5645 - RNA, 21 nt, synthetic construct
  source 1..21: mol_type = other RNA
cgccgaggctgccatcaagag

SEQ ID NO: 5646 - RNA, 21 nt, synthetic construct
  source 1..21: mol_type = other RNA
cgccgcacggaccccgcgctg

SEQ ID NO: 5647 - RNA, 21 nt, synthetic construct
  source 1..21: mol_type = other RNA
cgccggccgccaccagcctct

SEQ ID NO: 5648 - RNA, 21 nt, synthetic construct
  source 1..21: mol_type = other RNA
cgcctccaagcggttagagtc

SEQ ID NO: 5649 - RNA, 21 nt, synthetic construct
  source 1..21: mol_type = other RNA
cgcctcgtgccgttgctcgac

SEQ ID NO: 5650 - RNA, 21 nt, synthetic construct
  source 1..21: mol_type = other RNA
cgcctgcctcgcagtagcggt

SEQ ID NO: 5651 - RNA, 21 nt, synthetic construct
  source 1..21: mol_type = other RNA
cgcctggcccccgtgcagcgc

SEQ ID NO: 5652 - RNA, 21 nt, synthetic construct
  source 1..21: mol_type = other RNA
cgccttctccaaggaggacga

SEQ ID NO: 5653 - RNA, 21 nt, synthetic construct
  source 1..21: mol_type = other RNA
cgcgaacccgtagagctggcg

SEQ ID NO: 5654 - RNA, 21 nt, synthetic construct
  source 1..21: mol_type = other RNA
cgcgaggtggagcgctcgggc

SEQ ID NO: 5655 - RNA, 21 nt, synthetic construct
  source 1..21: mol_type = other RNA
cgcgcagccgagtggctcttc

SEQ ID NO: 5656 - RNA, 21 nt, synthetic construct
  source 1..21: mol_type = other RNA
cgcgcagtggcgcagcagcgc

SEQ ID NO: 5657 - RNA, 21 nt, synthetic construct
  source 1..21: mol_type = other RNA
cgcgcagttgcccagcgccag

SEQ ID NO: 5658 - RNA, 21 nt, synthetic construct
  source 1..21: mol_type = other RNA
cgcgcattgggctgggcgtga

SEQ ID NO: 5659 - RNA, 21 nt, synthetic construct
  source 1..21: mol_type = other RNA
cgcgccagctctacgggttcg

SEQ ID NO: 5660 - RNA, 21 nt, synthetic construct
  source 1..21: mol_type = other RNA
cgcgctccacctccttgttag

SEQ ID NO: 5661 - RNA, 21 nt, synthetic construct
  source 1..21: mol_type = other RNA
cgcgctgcacgggggccaggc

SEQ ID NO: 5662 - RNA, 21 nt, synthetic construct
  source 1..21: mol_type = other RNA
cgcgctgctgcgccactgcgc

SEQ ID NO: 5663 - RNA, 21 nt, synthetic construct
  source 1..21: mol_type = other RNA
cgcgctggcgctgggcaactg

SEQ ID NO: 5664 - RNA, 21 nt, synthetic construct
  source 1..21: mol_type = other RNA
cgcgcttctctaccatgcgtc

SEQ ID NO: 5665 - RNA, 21 nt, synthetic construct
  source 1..21: mol_type = other RNA
cgcggagcgtggcaggcatct

SEQ ID NO: 5666 - RNA, 21 nt, synthetic construct
  source 1..21: mol_type = other RNA
cgcggccctggcttgtgtcgc

SEQ ID NO: 5667 - RNA, 21 nt, synthetic construct
  source 1..21: mol_type = other RNA
cgcgggcccgacgacctgcag

SEQ ID NO: 5668 - RNA, 21 nt, synthetic construct
  source 1..21: mol_type = other RNA
cgcggggtccgtgcggcggca

SEQ ID NO: 5669 - RNA, 21 nt, synthetic construct
  source 1..21: mol_type = other RNA
cgcggtgctgtattggtgccg

SEQ ID NO: 5670 - RNA, 21 nt, synthetic construct
  source 1..21: mol_type = other RNA
cgcgtccaggccgccggccgc

SEQ ID NO: 5671 - RNA, 21 nt, synthetic construct
  source 1..21: mol_type = other RNA
cgcgtggcgcgcattgggctg

SEQ ID NO: 5672 - RNA, 21 nt, synthetic construct
  source 1..21: mol_type = other RNA
cgcgttccttcgccaggttca

SEQ ID NO: 5673 - RNA, 21 nt, synthetic construct
  source 1..21: mol_type = other RNA
cgctactgcgaggcaggcgtg

SEQ ID NO: 5674 - RNA, 21 nt, synthetic construct
  source 1..21: mol_type = other RNA
cgctccacctccttgttagtc

SEQ ID NO: 5675 - RNA, 21 nt, synthetic construct
  source 1..21: mol_type = other RNA
cgctccacctcgcgctccacc

SEQ ID NO: 5676 - RNA, 21 nt, synthetic construct
  source 1..21: mol_type = other RNA
cgctccgcgccagctctacgg

SEQ ID NO: 5677 - RNA, 21 nt, synthetic construct
  source 1..21: mol_type = other RNA
cgctcgccttctccaaggagg

SEQ ID NO: 5678 - RNA, 21 nt, synthetic construct
  source 1..21: mol_type = other RNA
cgctcgggcacgctggcgctc

SEQ ID NO: 5679 - RNA, 21 nt, synthetic construct
  source 1..21: mol_type = other RNA
cgctcgtggagccgcttgtgg

SEQ ID NO: 5680 - RNA, 21 nt, synthetic construct
  source 1..21: mol_type = other RNA
cgctgcaccgcctggcccccg

SEQ ID NO: 5681 - RNA, 21 nt, synthetic construct
  source 1..21: mol_type = other RNA
cgctgcacgggggccaggcgg

SEQ ID NO: 5682 - RNA, 21 nt, synthetic construct
  source 1..21: mol_type = other RNA
cgctgcaggtcgtcgggcccg

SEQ ID NO: 5683 - RNA, 21 nt, synthetic construct
  source 1..21: mol_type = other RNA
cgctgctgcgccactgcgcgc

SEQ ID NO: 5684 - RNA, 21 nt, synthetic construct
  source 1..21: mol_type = other RNA
cgctggaccctggccgcttcg

SEQ ID NO: 5685 - RNA, 21 nt, synthetic construct
  source 1..21: mol_type = other RNA
cgctggcgctcgtggagccgc

SEQ ID NO: 5686 - RNA, 21 nt, synthetic construct
  source 1..21: mol_type = other RNA
cgctggcgctgggcaactgcg

SEQ ID NO: 5687 - RNA, 21 nt, synthetic construct
  source 1..21: mol_type = other RNA
cgctggcgtccaccagacagc

SEQ ID NO: 5688 - RNA, 21 nt, synthetic construct
  source 1..21: mol_type = other RNA
cgctgggcaactgcgcgctgc

SEQ ID NO: 5689 - RNA, 21 nt, synthetic construct
  source 1..21: mol_type = other RNA
cgctgtctggtggacgccagc

SEQ ID NO: 5690 - RNA, 21 nt, synthetic construct
  source 1..21: mol_type = other RNA
cgcttcgcccgctgtctggtg

SEQ ID NO: 5691 - RNA, 21 nt, synthetic construct
  source 1..21: mol_type = other RNA
cgcttctctaccatgcgtcgc

SEQ ID NO: 5692 - RNA, 21 nt, synthetic construct
  source 1..21: mol_type = other RNA
cgcttggaggcgcagtgcatc

SEQ ID NO: 5693 - RNA, 21 nt, synthetic construct
  source 1..21: mol_type = other RNA
cgcttgtggcctcgctggacc

SEQ ID NO: 5694 - RNA, 21 nt, synthetic construct
  source 1..21: mol_type = other RNA
cggaccccgcgctgctgcgcc

SEQ ID NO: 5695 - RNA, 21 nt, synthetic construct
  source 1..21: mol_type = other RNA
cggagcgtggcaggcatcttg

SEQ ID NO: 5696 - RNA, 21 nt, synthetic construct
  source 1..21: mol_type = other RNA
cggaggagacatgccagaggc

SEQ ID NO: 5697 - RNA, 21 nt, synthetic construct
  source 1..21: mol_type = other RNA
cggcaccaatacagcaccgcg

SEQ ID NO: 5698 - RNA, 21 nt, synthetic construct
  source 1..21: mol_type = other RNA
cggcacgaggcgctgcaggtc

SEQ ID NO: 5699 - RNA, 21 nt, synthetic construct
  source 1..21: mol_type = other RNA
cggccagggtccagcgaggcc

SEQ ID NO: 5700 - RNA, 21 nt, synthetic construct
  source 1..21: mol_type = other RNA
cggccctggcttgtgtcgctg

SEQ ID NO: 5701 - RNA, 21 nt, synthetic construct
  source 1..21: mol_type = other RNA
cggccgccaccagcctctggc

SEQ ID NO: 5702 - RNA, 21 nt, synthetic construct
  source 1..21: mol_type = other RNA
cggccggcggcctggacgcgg

SEQ ID NO: 5703 - RNA, 21 nt, synthetic construct
  source 1..21: mol_type = other RNA
cggcctggacgcggtgctgta

SEQ ID NO: 5704 - RNA, 21 nt, synthetic construct
  source 1..21: mol_type = other RNA
cggcgcagaggtagaaagccc

SEQ ID NO: 5705 - RNA, 21 nt, synthetic construct
  source 1..21: mol_type = other RNA
cggcggcaccaatacagcacc

SEQ ID NO: 5706 - RNA, 21 nt, synthetic construct
  source 1..21: mol_type = other RNA
cggcggcctggacgcggtgct

SEQ ID NO: 5707 - RNA, 21 nt, synthetic construct
  source 1..21: mol_type = other RNA
cggctccacgagcgccagcgt

SEQ ID NO: 5708 - RNA, 21 nt, synthetic construct
  source 1..21: mol_type = other RNA
cggctgcacgcctgcctcgca

SEQ ID NO: 5709 - RNA, 21 nt, synthetic construct
  source 1..21: mol_type = other RNA
cggctgcgcgcttctctacca

SEQ ID NO: 5710 - RNA, 21 nt, synthetic construct
  source 1..21: mol_type = other RNA
cgggaagagccactcggctgc

SEQ ID NO: 5711 - RNA, 21 nt, synthetic construct
  source 1..21: mol_type = other RNA
cgggcacgctggcgctcgtgg

SEQ ID NO: 5712 - RNA, 21 nt, synthetic construct
  source 1..21: mol_type = other RNA
cgggcccgacgacctgcagcg

SEQ ID NO: 5713 - RNA, 21 nt, synthetic construct
  source 1..21: mol_type = other RNA
cgggcccgcggccctggcttg

SEQ ID NO: 5714 - RNA, 21 nt, synthetic construct
  source 1..21: mol_type = other RNA
cgggcgaagcggccagggtcc

SEQ ID NO: 5715 - RNA, 21 nt, synthetic construct
  source 1..21: mol_type = other RNA
cggggctttctacctctgcgc

SEQ ID NO: 5716 - RNA, 21 nt, synthetic construct
  source 1..21: mol_type = other RNA
cgggggccaggcggtgcagcg

SEQ ID NO: 5717 - RNA, 21 nt, synthetic construct
  source 1..21: mol_type = other RNA
cggggtccgtgcggcggcacc

SEQ ID NO: 5718 - RNA, 21 nt, synthetic construct
  source 1..21: mol_type = other RNA
cgggttcgcgttccttcgcca

SEQ ID NO: 5719 - RNA, 21 nt, synthetic construct
  source 1..21: mol_type = other RNA
cggtgcagcgacgcatggtag

SEQ ID NO: 5720 - RNA, 21 nt, synthetic construct
  source 1..21: mol_type = other RNA
cggtgctgtattggtgccgcc

SEQ ID NO: 5721 - RNA, 21 nt, synthetic construct
  source 1..21: mol_type = other RNA
cggtgttggcgactaacaagg

SEQ ID NO: 5722 - RNA, 21 nt, synthetic construct
  source 1..21: mol_type = other RNA
cggttagagtcgagcaacggc

SEQ ID NO: 5723 - RNA, 21 nt, synthetic construct
  source 1..21: mol_type = other RNA
cgtagagctggcgcggagcgt

SEQ ID NO: 5724 - RNA, 21 nt, synthetic construct
  source 1..21: mol_type = other RNA
cgtccaccagacagcgggcga

SEQ ID NO: 5725 - RNA, 21 nt, synthetic construct
  source 1..21: mol_type = other RNA
cgtccaggccgccggccgcca

SEQ ID NO: 5726 - RNA, 21 nt, synthetic construct
  source 1..21: mol_type = other RNA
cgtcctccttggagaaggcga

SEQ ID NO: 5727 - RNA, 21 nt, synthetic construct
  source 1..21: mol_type = other RNA
cgtcgctgcaccgcctggccc

SEQ ID NO: 5728 - RNA, 21 nt, synthetic construct
  source 1..21: mol_type = other RNA
cgtcgggcccgcggccctggc

SEQ ID NO: 5729 - RNA, 21 nt, synthetic construct
  source 1..21: mol_type = other RNA
cgtgatcctgaacctggcgaa

SEQ ID NO: 5730 - RNA, 21 nt, synthetic construct
  source 1..21: mol_type = other RNA
cgtgcagccgaagcagctcgt

SEQ ID NO: 5731 - RNA, 21 nt, synthetic construct
  source 1..21: mol_type = other RNA
cgtgcagcgcgcagttgccca

SEQ ID NO: 5732 - RNA, 21 nt, synthetic construct
  source 1..21: mol_type = other RNA
cgtgcccgagcgctccacctc

SEQ ID NO: 5733 - RNA, 21 nt, synthetic construct
  source 1..21: mol_type = other RNA
cgtgccgttgctcgactctaa

SEQ ID NO: 5734 - RNA, 21 nt, synthetic construct
  source 1..21: mol_type = other RNA
cgtgcggcggcaccaatacag

SEQ ID NO: 5735 - RNA, 21 nt, synthetic construct
  source 1..21: mol_type = other RNA
cgtggagccgcttgtggcctc

SEQ ID NO: 5736 - RNA, 21 nt, synthetic construct
  source 1..21: mol_type = other RNA
cgtggcaggcatcttggagca

SEQ ID NO: 5737 - RNA, 21 nt, synthetic construct
  source 1..21: mol_type = other RNA
cgtggcgcgcattgggctggg

SEQ ID NO: 5738 - RNA, 21 nt, synthetic construct
  source 1..21: mol_type = other RNA
cgttccttcgccaggttcagg

SEQ ID NO: 5739 - RNA, 21 nt, synthetic construct
  source 1..21: mol_type = other RNA
cgttgctcgactctaaccgct

SEQ ID NO: 5740 - RNA, 21 nt, synthetic construct
  source 1..21: mol_type = other RNA
ctaacaaggaggtggagcgcg

SEQ ID NO: 5741 - RNA, 21 nt, synthetic construct
  source 1..21: mol_type = other RNA
ctaaccgcttggaggcgcagt

SEQ ID NO: 5742 - RNA, 21 nt, synthetic construct
  source 1..21: mol_type = other RNA
ctaccatgcgtcgctgcaccg

SEQ ID NO: 5743 - RNA, 21 nt, synthetic construct
  source 1..21: mol_type = other RNA
ctacctctgcgccgaggctgc

SEQ ID NO: 5744 - RNA, 21 nt, synthetic construct
  source 1..21: mol_type = other RNA
ctacgggttcgcgttccttcg

SEQ ID NO: 5745 - RNA, 21 nt, synthetic construct
  source 1..21: mol_type = other RNA
ctactgcgaggcaggcgtgca

SEQ ID NO: 5746 - RNA, 21 nt, synthetic construct
  source 1..21: mol_type = other RNA
ctccaagatgcctgccacgct

SEQ ID NO: 5747 - RNA, 21 nt, synthetic construct
  source 1..21: mol_type = other RNA
ctccaagcggttagagtcgag

SEQ ID NO: 5748 - RNA, 21 nt, synthetic construct
  source 1..21: mol_type = other RNA
ctccaaggaggacgagctgct

SEQ ID NO: 5749 - RNA, 21 nt, synthetic construct
  source 1..21: mol_type = other RNA
ctccacctccttgttagtcgc

SEQ ID NO: 5750 - RNA, 21 nt, synthetic construct
  source 1..21: mol_type = other RNA
ctccacctcgcgctccacctc

SEQ ID NO: 5751 - RNA, 21 nt, synthetic construct
  source 1..21: mol_type = other RNA
ctccacgagcgccagcgtgcc

SEQ ID NO: 5752 - RNA, 21 nt, synthetic construct
  source 1..21: mol_type = other RNA
ctccgaatgcttgaacatgtg

SEQ ID NO: 5753 - RNA, 21 nt, synthetic construct
  source 1..21: mol_type = other RNA
ctccgcgccagctctacgggt

SEQ ID NO: 5754 - RNA, 21 nt, synthetic construct
  source 1..21: mol_type = other RNA
ctcctccgaatgcttgaacat

SEQ ID NO: 5755 - RNA, 21 nt, synthetic construct
  source 1..21: mol_type = other RNA
ctccttggagaaggcgagcgg

SEQ ID NO: 5756 - RNA, 21 nt, synthetic construct
  source 1..21: mol_type = other RNA
ctccttgttagtcgccaacac

SEQ ID NO: 5757 - RNA, 21 nt, synthetic construct
  source 1..21: mol_type = other RNA
ctcgactctaaccgcttggag

SEQ ID NO: 5758 - RNA, 21 nt, synthetic construct
  source 1..21: mol_type = other RNA
ctcgcagtagcggtgttggcg

SEQ ID NO: 5759 - RNA, 21 nt, synthetic construct
  source 1..21: mol_type = other RNA
ctcgccttctccaaggaggac

SEQ ID NO: 5760 - RNA, 21 nt, synthetic construct
  source 1..21: mol_type = other RNA
ctcgcgctccacctccttgtt

SEQ ID NO: 5761 - RNA, 21 nt, synthetic construct
  source 1..21: mol_type = other RNA
ctcgctggaccctggccgctt

SEQ ID NO: 5762 - RNA, 21 nt, synthetic construct
  source 1..21: mol_type = other RNA
ctcggcgcagaggtagaaagc

SEQ ID NO: 5763 - RNA, 21 nt, synthetic construct
  source 1..21: mol_type = other RNA
ctcggctgcgcgcttctctac

SEQ ID NO: 5764 - RNA, 21 nt, synthetic construct
  source 1..21: mol_type = other RNA
ctcgggcacgctggcgctcgt

SEQ ID NO: 5765 - RNA, 21 nt, synthetic construct
  source 1..21: mol_type = other RNA
ctcgtcctccttggagaaggc

SEQ ID NO: 5766 - RNA, 21 nt, synthetic construct
  source 1..21: mol_type = other RNA
ctcgtgccgttgctcgactct

SEQ ID NO: 5767 - RNA, 21 nt, synthetic construct
  source 1..21: mol_type = other RNA
ctcgtggagccgcttgtggcc

SEQ ID NO: 5768 - RNA, 21 nt, synthetic construct
  source 1..21: mol_type = other RNA
ctctaaccgcttggaggcgca

SEQ ID NO: 5769 - RNA, 21 nt, synthetic construct
  source 1..21: mol_type = other RNA
ctctaccatgcgtcgctgcac

SEQ ID NO: 5770 - RNA, 21 nt, synthetic construct
  source 1..21: mol_type = other RNA
ctctacgggttcgcgttcctt

SEQ ID NO: 5771 - RNA, 21 nt, synthetic construct
  source 1..21: mol_type = other RNA
ctctgcgccgaggctgccatc

SEQ ID NO: 5772 - RNA, 21 nt, synthetic construct
  source 1..21: mol_type = other RNA
ctctggcatgtctcctccgaa

SEQ ID NO: 5773 - RNA, 21 nt, synthetic construct
  source 1..21: mol_type = other RNA
ctcttcccgctcgccttctcc

SEQ ID NO: 5774 - RNA, 21 nt, synthetic construct
  source 1..21: mol_type = other RNA
ctcttgatggcagcctcggcg

SEQ ID NO: 5775 - RNA, 21 nt, synthetic construct
  source 1..21: mol_type = other RNA
ctgaacctggcgaaggaacgc

SEQ ID NO: 5776 - RNA, 21 nt, synthetic construct
  source 1..21: mol_type = other RNA
ctgcaaggcaagaccaaggtg

SEQ ID NO: 5777 - RNA, 21 nt, synthetic construct
  source 1..21: mol_type = other RNA
ctgcacccaccttggtcttgc

SEQ ID NO: 5778 - RNA, 21 nt, synthetic construct
  source 1..21: mol_type = other RNA
ctgcaccgcctggcccccgtg

SEQ ID NO: 5779 - RNA, 21 nt, synthetic construct
  source 1..21: mol_type = other RNA
ctgcacgcctgcctcgcagta

SEQ ID NO: 5780 - RNA, 21 nt, synthetic construct
  source 1..21: mol_type = other RNA
ctgcacgggggccaggcggtg

SEQ ID NO: 5781 - RNA, 21 nt, synthetic construct
  source 1..21: mol_type = other RNA
ctgcagcgcctcgtgccgttg

SEQ ID NO: 5782 - RNA, 21 nt, synthetic construct
  source 1..21: mol_type = other RNA
ctgcaggtcgtcgggcccgcg

SEQ ID NO: 5783 - RNA, 21 nt, synthetic construct
  source 1..21: mol_type = other RNA
ctgccacgctccgcgccagct

SEQ ID NO: 5784 - RNA, 21 nt, synthetic construct
  source 1..21: mol_type = other RNA
ctgccatcaagagcctgcaag

SEQ ID NO: 5785 - RNA, 21 nt, synthetic construct
  source 1..21: mol_type = other RNA
ctgcctcgcagtagcggtgtt

SEQ ID NO: 5786 - RNA, 21 nt, synthetic construct
  source 1..21: mol_type = other RNA
ctgcgaggcaggcgtgcagcc

SEQ ID NO: 5787 - RNA, 21 nt, synthetic construct
  source 1..21: mol_type = other RNA
ctgcgccactgcgcgctggcg

SEQ ID NO: 5788 - RNA, 21 nt, synthetic construct
  source 1..21: mol_type = other RNA
ctgcgccgaggctgccatcaa

SEQ ID NO: 5789 - RNA, 21 nt, synthetic construct
  source 1..21: mol_type = other RNA
ctgcgcctccaagcggttaga

SEQ ID NO: 5790 - RNA, 21 nt, synthetic construct
  source 1..21: mol_type = other RNA
ctgcgcgctgcacgggggcca

SEQ ID NO: 5791 - RNA, 21 nt, synthetic construct
  source 1..21: mol_type = other RNA
ctgcgcgctggcgctgggcaa

SEQ ID NO: 5792 - RNA, 21 nt, synthetic construct
  source 1..21: mol_type = other RNA
ctgcgcgcttctctaccatgc

SEQ ID NO: 5793 - RNA, 21 nt, synthetic construct
  source 1..21: mol_type = other RNA
ctgctgcgccactgcgcgctg

SEQ ID NO: 5794 - RNA, 21 nt, synthetic construct
  source 1..21: mol_type = other RNA
ctgcttcggctgcacgcctgc

SEQ ID NO: 5795 - RNA, 21 nt, synthetic construct
  source 1..21: mol_type = other RNA
ctggaccctggccgcttcgcc

SEQ ID NO: 5796 - RNA, 21 nt, synthetic construct
  source 1..21: mol_type = other RNA
ctggacgcggtgctgtattgg

SEQ ID NO: 5797 - RNA, 21 nt, synthetic construct
  source 1..21: mol_type = other RNA
ctggcatgtctcctccgaatg

SEQ ID NO: 5798 - RNA, 21 nt, synthetic construct
  source 1..21: mol_type = other RNA
ctggcccccgtgcagcgcgca

SEQ ID NO: 5799 - RNA, 21 nt, synthetic construct
  source 1..21: mol_type = other RNA
ctggccgcttcgcccgctgtc

SEQ ID NO: 5800 - RNA, 21 nt, synthetic construct
  source 1..21: mol_type = other RNA
ctggcgaaggaacgcgaaccc

SEQ ID NO: 5801 - RNA, 21 nt, synthetic construct
  source 1..21: mol_type = other RNA
ctggcgcggagcgtggcaggc

SEQ ID NO: 5802 - RNA, 21 nt, synthetic construct
  source 1..21: mol_type = other RNA
ctggcgctcgtggagccgctt

SEQ ID NO: 5803 - RNA, 21 nt, synthetic construct
  source 1..21: mol_type = other RNA
ctggcgctgggcaactgcgcg

SEQ ID NO: 5804 - RNA, 21 nt, synthetic construct
  source 1..21: mol_type = other RNA
ctggcgtccaccagacagcgg

SEQ ID NO: 5805 - RNA, 21 nt, synthetic construct
  source 1..21: mol_type = other RNA
ctggcttgtgtcgctggcgtc

SEQ ID NO: 5806 - RNA, 21 nt, synthetic construct
  source 1..21: mol_type = other RNA
ctgggcaactgcgcgctgcac

SEQ ID NO: 5807 - RNA, 21 nt, synthetic construct
  source 1..21: mol_type = other RNA
ctgggcgtgatcctgaacctg

SEQ ID NO: 5808 - RNA, 21 nt, synthetic construct
  source 1..21: mol_type = other RNA
ctggtggacgccagcgacaca

SEQ ID NO: 5809 - RNA, 21 nt, synthetic construct
  source 1..21: mol_type = other RNA
ctggtggcggccggcggcctg

SEQ ID NO: 5810 - RNA, 21 nt, synthetic construct
  source 1..21: mol_type = other RNA
ctgtattggtgccgccgcacg

SEQ ID NO: 5811 - RNA, 21 nt, synthetic construct
  source 1..21: mol_type = other RNA
ctgtctggtggacgccagcga

SEQ ID NO: 5812 - RNA, 21 nt, synthetic construct
  source 1..21: mol_type = other RNA
cttcccgctcgccttctccaa

SEQ ID NO: 5813 - RNA, 21 nt, synthetic construct
  source 1..21: mol_type = other RNA
cttcgccaggttcaggatcac

SEQ ID NO: 5814 - RNA, 21 nt, synthetic construct
  source 1..21: mol_type = other RNA
cttcgcccgctgtctggtgga

SEQ ID NO: 5815 - RNA, 21 nt, synthetic construct
  source 1..21: mol_type = other RNA
cttcggctgcacgcctgcctc

SEQ ID NO: 5816 - RNA, 21 nt, synthetic construct
  source 1..21: mol_type = other RNA
cttctccaaggaggacgagct

SEQ ID NO: 5817 - RNA, 21 nt, synthetic construct
  source 1..21: mol_type = other RNA
cttctctaccatgcgtcgctg

SEQ ID NO: 5818 - RNA, 21 nt, synthetic construct
  source 1..21: mol_type = other RNA
cttgaacatgtgctccaagat

SEQ ID NO: 5819 - RNA, 21 nt, synthetic construct
  source 1..21: mol_type = other RNA
cttgatggcagcctcggcgca

SEQ ID NO: 5820 - RNA, 21 nt, synthetic construct
  source 1..21: mol_type = other RNA
cttgcaggctcttgatggcag

SEQ ID NO: 5821 - RNA, 21 nt, synthetic construct
  source 1..21: mol_type = other RNA
cttgccttgcaggctcttgat

SEQ ID NO: 5822 - RNA, 21 nt, synthetic construct
  source 1..21: mol_type = other RNA
cttggagaaggcgagcgggaa

SEQ ID NO: 5823 - RNA, 21 nt, synthetic construct
  source 1..21: mol_type = other RNA
cttggagcacatgttcaagca

SEQ ID NO: 5824 - RNA, 21 nt, synthetic construct
  source 1..21: mol_type = other RNA
cttggaggcgcagtgcatcgg

SEQ ID NO: 5825 - RNA, 21 nt, synthetic construct
  source 1..21: mol_type = other RNA
cttggtcttgccttgcaggct

SEQ ID NO: 5826 - RNA, 21 nt, synthetic construct
  source 1..21: mol_type = other RNA
cttgtggcctcgctggaccct

SEQ ID NO: 5827 - RNA, 21 nt, synthetic construct
  source 1..21: mol_type = other RNA
cttgtgtcgctggcgtccacc

SEQ ID NO: 5828 - RNA, 21 nt, synthetic construct
  source 1..21: mol_type = other RNA
cttgttagtcgccaacaccgc

SEQ ID NO: 5829 - RNA, 21 nt, synthetic construct
  source 1..21: mol_type = other RNA
ctttctacctctgcgccgagg

SEQ ID NO: 5830 - RNA, 21 nt, synthetic construct
  source 1..21: mol_type = other RNA
gaaagccccgatgcactgcgc

SEQ ID NO: 5831 - RNA, 21 nt, synthetic construct
  source 1..21: mol_type = other RNA
gaacatgtgctccaagatgcc

SEQ ID NO: 5832 - RNA, 21 nt, synthetic construct
  source 1..21: mol_type = other RNA
gaacccgtagagctggcgcgg

SEQ ID NO: 5833 - RNA, 21 nt, synthetic construct
  source 1..21: mol_type = other RNA
gaacctggcgaaggaacgcga

SEQ ID NO: 5834 - RNA, 21 nt, synthetic construct
  source 1..21: mol_type = other RNA
gaacgcgaacccgtagagctg

SEQ ID NO: 5835 - RNA, 21 nt, synthetic construct
  source 1..21: mol_type = other RNA
gaagagccactcggctgcgcg

SEQ ID NO: 5836 - RNA, 21 nt, synthetic construct
  source 1..21: mol_type = other RNA
gaagcagctcgtcctccttgg

SEQ ID NO: 5837 - RNA, 21 nt, synthetic construct
  source 1..21: mol_type = other RNA
gaagcgcgcagccgagtggct

SEQ ID NO: 5838 - RNA, 21 nt, synthetic construct
  source 1..21: mol_type = other RNA
gaagcggccagggtccagcga

SEQ ID NO: 5839 - RNA, 21 nt, synthetic construct
  source 1..21: mol_type = other RNA
gaaggaacgcgaacccgtaga

SEQ ID NO: 5840 - RNA, 21 nt, synthetic construct
  source 1..21: mol_type = other RNA
gaaggcgagcgggaagagcca

SEQ ID NO: 5841 - RNA, 21 nt, synthetic construct
  source 1..21: mol_type = other RNA
gaatgcttgaacatgtgctcc

SEQ ID NO: 5842 - RNA, 21 nt, synthetic construct
  source 1..21: mol_type = other RNA
gacacaagccagggccgcggg

SEQ ID NO: 5843 - RNA, 21 nt, synthetic construct
  source 1..21: mol_type = other RNA
gacagcgggcgaagcggccag

SEQ ID NO: 5844 - RNA, 21 nt, synthetic construct
  source 1..21: mol_type = other RNA
gacatgccagaggctggtggc

SEQ ID NO: 5845 - RNA, 21 nt, synthetic construct
  source 1..21: mol_type = other RNA
gaccaaggtgggtgcagatgt

SEQ ID NO: 5846 - RNA, 21 nt, synthetic construct
  source 1..21: mol_type = other RNA
gaccccgcgctgctgcgccac

SEQ ID NO: 5847 - RNA, 21 nt, synthetic construct
  source 1..21: mol_type = other RNA
gaccctggccgcttcgcccgc

SEQ ID NO: 5848 - RNA, 21 nt, synthetic construct
  source 1..21: mol_type = other RNA
gaccgcgtggcgcgcattggg

SEQ ID NO: 5849 - RNA, 21 nt, synthetic construct
  source 1..21: mol_type = other RNA
gacctgcagcgcctcgtgccg

SEQ ID NO: 5850 - RNA, 21 nt, synthetic construct
  source 1..21: mol_type = other RNA
gacgacctgcagcgcctcgtg

SEQ ID NO: 5851 - RNA, 21 nt, synthetic construct
  source 1..21: mol_type = other RNA
gacgagctgcttcggctgcac

SEQ ID NO: 5852 - RNA, 21 nt, synthetic construct
  source 1..21: mol_type = other RNA
gacgcatggtagagaagcgcg

SEQ ID NO: 5853 - RNA, 21 nt, synthetic construct
  source 1..21: mol_type = other RNA
gacgccagcgacacaagccag

SEQ ID NO: 5854 - RNA, 21 nt, synthetic construct
  source 1..21: mol_type = other RNA
gacgcggtgctgtattggtgc

SEQ ID NO: 5855 - RNA, 21 nt, synthetic construct
  source 1..21: mol_type = other RNA
gactaacaaggaggtggagcg

SEQ ID NO: 5856 - RNA, 21 nt, synthetic construct
  source 1..21: mol_type = other RNA
gactctaaccgcttggaggcg

SEQ ID NO: 5857 - RNA, 21 nt, synthetic construct
  source 1..21: mol_type = other RNA
gagaagcgcgcagccgagtgg

SEQ ID NO: 5858 - RNA, 21 nt, synthetic construct
  source 1..21: mol_type = other RNA
gagaaggcgagcgggaagagc

SEQ ID NO: 5859 - RNA, 21 nt, synthetic construct
  source 1..21: mol_type = other RNA
gagacatgccagaggctggtg

SEQ ID NO: 5860 - RNA, 21 nt, synthetic construct
  source 1..21: mol_type = other RNA
gagcaacggcacgaggcgctg

SEQ ID NO: 5861 - RNA, 21 nt, synthetic construct
  source 1..21: mol_type = other RNA
gagcacatgttcaagcattcg

SEQ ID NO: 5862 - RNA, 21 nt, synthetic construct
  source 1..21: mol_type = other RNA
gagccactcggctgcgcgctt

SEQ ID NO: 5863 - RNA, 21 nt, synthetic construct
  source 1..21: mol_type = other RNA
gagccgcttgtggcctcgctg

SEQ ID NO: 5864 - RNA, 21 nt, synthetic construct
  source 1..21: mol_type = other RNA
gagcctgcaaggcaagaccaa

SEQ ID NO: 5865 - RNA, 21 nt, synthetic construct
  source 1..21: mol_type = other RNA
gagcgccagcgtgcccgagcg

SEQ ID NO: 5866 - RNA, 21 nt, synthetic construct
  source 1..21: mol_type = other RNA
gagcgcgaggtggagcgctcg

SEQ ID NO: 5867 - RNA, 21 nt, synthetic construct
  source 1..21: mol_type = other RNA
gagcgctccacctcgcgctcc

SEQ ID NO: 5868 - RNA, 21 nt, synthetic construct
  source 1..21: mol_type = other RNA
gagcgctcgggcacgctggcg

SEQ ID NO: 5869 - RNA, 21 nt, synthetic construct
  source 1..21: mol_type = other RNA
gagcgggaagagccactcggc

SEQ ID NO: 5870 - RNA, 21 nt, synthetic construct
  source 1..21: mol_type = other RNA
gagcgtggcaggcatcttgga

SEQ ID NO: 5871 - RNA, 21 nt, synthetic construct
  source 1..21: mol_type = other RNA
gagctgcttcggctgcacgcc

SEQ ID NO: 5872 - RNA, 21 nt, synthetic construct
  source 1..21: mol_type = other RNA
gagctggcgcggagcgtggca

SEQ ID NO: 5873 - RNA, 21 nt, synthetic construct
  source 1..21: mol_type = other RNA
gaggacgagctgcttcggctg

SEQ ID NO: 5874 - RNA, 21 nt, synthetic construct
  source 1..21: mol_type = other RNA
gaggagacatgccagaggctg

SEQ ID NO: 5875 - RNA, 21 nt, synthetic construct
  source 1..21: mol_type = other RNA
gaggcaggcgtgcagccgaag

SEQ ID NO: 5876 - RNA, 21 nt, synthetic construct
  source 1..21: mol_type = other RNA
gaggccacaagcggctccacg

SEQ ID NO: 5877 - RNA, 21 nt, synthetic construct
  source 1..21: mol_type = other RNA
gaggcgcagtgcatcggggct

SEQ ID NO: 5878 - RNA, 21 nt, synthetic construct
  source 1..21: mol_type = other RNA
gaggcgctgcaggtcgtcggg

SEQ ID NO: 5879 - RNA, 21 nt, synthetic construct
  source 1..21: mol_type = other RNA
gaggctgccatcaagagcctg

SEQ ID NO: 5880 - RNA, 21 nt, synthetic construct
  source 1..21: mol_type = other RNA
gaggctggtggcggccggcgg

SEQ ID NO: 5881 - RNA, 21 nt, synthetic construct
  source 1..21: mol_type = other RNA
gaggtagaaagccccgatgca

SEQ ID NO: 5882 - RNA, 21 nt, synthetic construct
  source 1..21: mol_type = other RNA
gaggtggagcgcgaggtggag

SEQ ID NO: 5883 - RNA, 21 nt, synthetic construct
  source 1..21: mol_type = other RNA
gaggtggagcgctcgggcacg

SEQ ID NO: 5884 - RNA, 21 nt, synthetic construct
  source 1..21: mol_type = other RNA
gagtcgagcaacggcacgagg

SEQ ID NO: 5885 - RNA, 21 nt, synthetic construct
  source 1..21: mol_type = other RNA
gagtggctcttcccgctcgcc

SEQ ID NO: 5886 - RNA, 21 nt, synthetic construct
  source 1..21: mol_type = other RNA
gatcacgcccagcccaatgcg

SEQ ID NO: 5887 - RNA, 21 nt, synthetic construct
  source 1..21: mol_type = other RNA
gatccacccaaccccacatct

SEQ ID NO: 5888 - RNA, 21 nt, synthetic construct
  source 1..21: mol_type = other RNA
gatcctgaacctggcgaagga

SEQ ID NO: 5889 - RNA, 21 nt, synthetic construct
  source 1..21: mol_type = other RNA
gatgcactgcgcctccaagcg

SEQ ID NO: 5890 - RNA, 21 nt, synthetic construct
  source 1..21: mol_type = other RNA
gatgcctgccacgctccgcgc

SEQ ID NO: 5891 - RNA, 21 nt, synthetic construct
  source 1..21: mol_type = other RNA
gatggcagcctcggcgcagag

SEQ ID NO: 5892 - RNA, 21 nt, synthetic construct
  source 1..21: mol_type = other RNA
gcaacggcacgaggcgctgca

SEQ ID NO: 5893 - RNA, 21 nt, synthetic construct
  source 1..21: mol_type = other RNA
gcaactgcgcgctgcacgggg

SEQ ID NO: 5894 - RNA, 21 nt, synthetic construct
  source 1..21: mol_type = other RNA
gcaagaccaaggtgggtgcag

SEQ ID NO: 5895 - RNA, 21 nt, synthetic construct
  source 1..21: mol_type = other RNA
gcaaggcaagaccaaggtggg

SEQ ID NO: 5896 - RNA, 21 nt, synthetic construct
  source 1..21: mol_type = other RNA
gcacatgttcaagcattcgga

SEQ ID NO: 5897 - RNA, 21 nt, synthetic construct
  source 1..21: mol_type = other RNA
gcaccaatacagcaccgcgtc

SEQ ID NO: 5898 - RNA, 21 nt, synthetic construct
  source 1..21: mol_type = other RNA
gcacccaccttggtcttgcct

SEQ ID NO: 5899 - RNA, 21 nt, synthetic construct
  source 1..21: mol_type = other RNA
gcaccgcctggcccccgtgca

SEQ ID NO: 5900 - RNA, 21 nt, synthetic construct
  source 1..21: mol_type = other RNA
gcaccgcgtccaggccgccgg

SEQ ID NO: 5901 - RNA, 21 nt, synthetic construct
  source 1..21: mol_type = other RNA
gcacgaggcgctgcaggtcgt

SEQ ID NO: 5902 - RNA, 21 nt, synthetic construct
  source 1..21: mol_type = other RNA
gcacgcctgcctcgcagtagc

SEQ ID NO: 5903 - RNA, 21 nt, synthetic construct
  source 1..21: mol_type = other RNA
gcacgctggcgctcgtggagc

SEQ ID NO: 5904 - RNA, 21 nt, synthetic construct
  source 1..21: mol_type = other RNA
gcacggaccccgcgctgctgc

SEQ ID NO: 5905 - RNA, 21 nt, synthetic construct
  source 1..21: mol_type = other RNA
gcacgggggccaggcggtgca

SEQ ID NO: 5906 - RNA, 21 nt, synthetic construct
  source 1..21: mol_type = other RNA
gcactgcgcctccaagcggtt

SEQ ID NO: 5907 - RNA, 21 nt, synthetic construct
  source 1..21: mol_type = other RNA
gcagaggtagaaagccccgat

SEQ ID NO: 5908 - RNA, 21 nt, synthetic construct
  source 1..21: mol_type = other RNA
gcagcagcgcggggtccgtgc

SEQ ID NO: 5909 - RNA, 21 nt, synthetic construct
  source 1..21: mol_type = other RNA
gcagccgaagcagctcgtcct

SEQ ID NO: 5910 - RNA, 21 nt, synthetic construct
  source 1..21: mol_type = other RNA
gcagccgagtggctcttcccg

SEQ ID NO: 5911 - RNA, 21 nt, synthetic construct
  source 1..21: mol_type = other RNA
gcagcctcggcgcagaggtag

SEQ ID NO: 5912 - RNA, 21 nt, synthetic construct
  source 1..21: mol_type = other RNA
gcagcgacgcatggtagagaa

SEQ ID NO: 5913 - RNA, 21 nt, synthetic construct
  source 1..21: mol_type = other RNA
gcagcgcctcgtgccgttgct

SEQ ID NO: 5914 - RNA, 21 nt, synthetic construct
  source 1..21: mol_type = other RNA
gcagcgcgcagttgcccagcg

SEQ ID NO: 5915 - RNA, 21 nt, synthetic construct
  source 1..21: mol_type = other RNA
gcagcgcggggtccgtgcggc

SEQ ID NO: 5916 - RNA, 21 nt, synthetic construct
  source 1..21: mol_type = other RNA
gcagctcgtcctccttggaga

SEQ ID NO: 5917 - RNA, 21 nt, synthetic construct
  source 1..21: mol_type = other RNA
gcaggcatcttggagcacatg

SEQ ID NO: 5918 - RNA, 21 nt, synthetic construct
  source 1..21: mol_type = other RNA
gcaggcgtgcagccgaagcag

SEQ ID NO: 5919 - RNA, 21 nt, synthetic construct
  source 1..21: mol_type = other RNA
gcaggctcttgatggcagcct

SEQ ID NO: 5920 - RNA, 21 nt, synthetic construct
  source 1..21: mol_type = other RNA
gcaggtcgtcgggcccgcggc

SEQ ID NO: 5921 - RNA, 21 nt, synthetic construct
  source 1..21: mol_type = other RNA
gcagtagcggtgttggcgact

SEQ ID NO: 5922 - RNA, 21 nt, synthetic construct
  source 1..21: mol_type = other RNA
gcagtgcatcggggctttcta

SEQ ID NO: 5923 - RNA, 21 nt, synthetic construct
  source 1..21: mol_type = other RNA
gcagtggcgcagcagcgcggg

SEQ ID NO: 5924 - RNA, 21 nt, synthetic construct
  source 1..21: mol_type = other RNA
gcagttgcccagcgccagcgc

SEQ ID NO: 5925 - RNA, 21 nt, synthetic construct
  source 1..21: mol_type = other RNA
gcatcggggctttctacctct

SEQ ID NO: 5926 - RNA, 21 nt, synthetic construct
  source 1..21: mol_type = other RNA
gcatcttggagcacatgttca

SEQ ID NO: 5927 - RNA, 21 nt, synthetic construct
  source 1..21: mol_type = other RNA
gcatggtagagaagcgcgcag

SEQ ID NO: 5928 - RNA, 21 nt, synthetic construct
  source 1..21: mol_type = other RNA
gcatgtctcctccgaatgctt

SEQ ID NO: 5929 - RNA, 21 nt, synthetic construct
  source 1..21: mol_type = other RNA
gcattcggaggagacatgcca

SEQ ID NO: 5930 - RNA, 21 nt, synthetic construct
  source 1..21: mol_type = other RNA
gcattgggctgggcgtgatcc

SEQ ID NO: 5931 - RNA, 21 nt, synthetic construct
  source 1..21: mol_type = other RNA
gccaacaccgctactgcgagg

SEQ ID NO: 5932 - RNA, 21 nt, synthetic construct
  source 1..21: mol_type = other RNA
gccacaagcggctccacgagc

SEQ ID NO: 5933 - RNA, 21 nt, synthetic construct
  source 1..21: mol_type = other RNA
gccaccagcctctggcatgtc

SEQ ID NO: 5934 - RNA, 21 nt, synthetic construct
  source 1..21: mol_type = other RNA
gccacgctccgcgccagctct

SEQ ID NO: 5935 - RNA, 21 nt, synthetic construct
  source 1..21: mol_type = other RNA
gccactcggctgcgcgcttct

SEQ ID NO: 5936 - RNA, 21 nt, synthetic construct
  source 1..21: mol_type = other RNA
gccactgcgcgctggcgctgg

SEQ ID NO: 5937 - RNA, 21 nt, synthetic construct
  source 1..21: mol_type = other RNA
gccagaggctggtggcggccg

SEQ ID NO: 5938 - RNA, 21 nt, synthetic construct
  source 1..21: mol_type = other RNA
gccagcgacacaagccagggc

SEQ ID NO: 5939 - RNA, 21 nt, synthetic construct
  source 1..21: mol_type = other RNA
gccagcgcgcagtggcgcagc

SEQ ID NO: 5940 - RNA, 21 nt, synthetic construct
  source 1..21: mol_type = other RNA
gccagcgtgcccgagcgctcc

SEQ ID NO: 5941 - RNA, 21 nt, synthetic construct
  source 1..21: mol_type = other RNA
gccagctctacgggttcgcgt

SEQ ID NO: 5942 - RNA, 21 nt, synthetic construct
  source 1..21: mol_type = other RNA
gccaggcggtgcagcgacgca

SEQ ID NO: 5943 - RNA, 21 nt, synthetic construct
  source 1..21: mol_type = other RNA
gccagggccgcgggcccgacg

SEQ ID NO: 5944 - RNA, 21 nt, synthetic construct
  source 1..21: mol_type = other RNA
gccagggtccagcgaggccac

SEQ ID NO: 5945 - RNA, 21 nt, synthetic construct
  source 1..21: mol_type = other RNA
gccaggttcaggatcacgccc

SEQ ID NO: 5946 - RNA, 21 nt, synthetic construct
  source 1..21: mol_type = other RNA
gccatcaagagcctgcaaggc

SEQ ID NO: 5947 - RNA, 21 nt, synthetic construct
  source 1..21: mol_type = other RNA
gcccagcgccagcgcgcagtg

SEQ ID NO: 5948 - RNA, 21 nt, synthetic construct
  source 1..21: mol_type = other RNA
gcccccgtgcagcgcgcagtt

SEQ ID NO: 5949 - RNA, 21 nt, synthetic construct
  source 1..21: mol_type = other RNA
gccccgatgcactgcgcctcc

SEQ ID NO: 5950 - RNA, 21 nt, synthetic construct
  source 1..21: mol_type = other RNA
gcccgacgacctgcagcgcct

SEQ ID NO: 5951 - RNA, 21 nt, synthetic construct
  source 1..21: mol_type = other RNA
gcccgagcgctccacctcgcg

SEQ ID NO: 5952 - RNA, 21 nt, synthetic construct
  source 1..21: mol_type = other RNA
gcccgcggccctggcttgtgt

SEQ ID NO: 5953 - RNA, 21 nt, synthetic construct
  source 1..21: mol_type = other RNA
gcccgctgtctggtggacgcc

SEQ ID NO: 5954 - RNA, 21 nt, synthetic construct
  source 1..21: mol_type = other RNA
gccctggcttgtgtcgctggc

SEQ ID NO: 5955 - RNA, 21 nt, synthetic construct
  source 1..21: mol_type = other RNA
gccgaagcagctcgtcctcct

SEQ ID NO: 5956 - RNA, 21 nt, synthetic construct
  source 1..21: mol_type = other RNA
gccgaggctgccatcaagagc

SEQ ID NO: 5957 - RNA, 21 nt, synthetic construct
  source 1..21: mol_type = other RNA
gccgagtggctcttcccgctc

SEQ ID NO: 5958 - RNA, 21 nt, synthetic construct
  source 1..21: mol_type = other RNA
gccgcacggaccccgcgctgc

SEQ ID NO: 5959 - RNA, 21 nt, synthetic construct
  source 1..21: mol_type = other RNA
gccgccaccagcctctggcat

SEQ ID NO: 5960 - RNA, 21 nt, synthetic construct
  source 1..21: mol_type = other RNA
gccgccgcacggaccccgcgc

SEQ ID NO: 5961 - RNA, 21 nt, synthetic construct
  source 1..21: mol_type = other RNA
gccgccggccgccaccagcct

SEQ ID NO: 5962 - RNA, 21 nt, synthetic construct
  source 1..21: mol_type = other RNA
gccgcgggcccgacgacctgc

SEQ ID NO: 5963 - RNA, 21 nt, synthetic construct
  source 1..21: mol_type = other RNA
gccgcttcgcccgctgtctgg

SEQ ID NO: 5964 - RNA, 21 nt, synthetic construct
  source 1..21: mol_type = other RNA
gccgcttgtggcctcgctgga

SEQ ID NO: 5965 - RNA, 21 nt, synthetic construct
  source 1..21: mol_type = other RNA
gccggccgccaccagcctctg

SEQ ID NO: 5966 - RNA, 21 nt, synthetic construct
  source 1..21: mol_type = other RNA
gccggcggcctggacgcggtg

SEQ ID NO: 5967 - RNA, 21 nt, synthetic construct
  source 1..21: mol_type = other RNA
gccgttgctcgactctaaccg

SEQ ID NO: 5968 - RNA, 21 nt, synthetic construct
  source 1..21: mol_type = other RNA
gcctccaagcggttagagtcg

SEQ ID NO: 5969 - RNA, 21 nt, synthetic construct
  source 1..21: mol_type = other RNA
gcctcgcagtagcggtgttgg

SEQ ID NO: 5970 - RNA, 21 nt, synthetic construct
  source 1..21: mol_type = other RNA
gcctcgctggaccctggccgc

SEQ ID NO: 5971 - RNA, 21 nt, synthetic construct
  source 1..21: mol_type = other RNA
gcctcggcgcagaggtagaaa

SEQ ID NO: 5972 - RNA, 21 nt, synthetic construct
  source 1..21: mol_type = other RNA
gcctcgtgccgttgctcgact

SEQ ID NO: 5973 - RNA, 21 nt, synthetic construct
  source 1..21: mol_type = other RNA
gcctctggcatgtctcctccg

SEQ ID NO: 5974 - RNA, 21 nt, synthetic construct
  source 1..21: mol_type = other RNA
gcctgcaaggcaagaccaagg

SEQ ID NO: 5975 - RNA, 21 nt, synthetic construct
  source 1..21: mol_type = other RNA
gcctgccacgctccgcgccag

SEQ ID NO: 5976 - RNA, 21 nt, synthetic construct
  source 1..21: mol_type = other RNA
gcctgcctcgcagtagcggtg

SEQ ID NO: 5977 - RNA, 21 nt, synthetic construct
  source 1..21: mol_type = other RNA
gcctggacgcggtgctgtatt

SEQ ID NO: 5978 - RNA, 21 nt, synthetic construct
  source 1..21: mol_type = other RNA
gcctggcccccgtgcagcgcg

SEQ ID NO: 5979 - RNA, 21 nt, synthetic construct
  source 1..21: mol_type = other RNA
gccttctccaaggaggacgag

SEQ ID NO: 5980 - RNA, 21 nt, synthetic construct
  source 1..21: mol_type = other RNA
gccttgcaggctcttgatggc

SEQ ID NO: 5981 - RNA, 21 nt, synthetic construct
  source 1..21: mol_type = other RNA
gcgaacccgtagagctggcgc

SEQ ID NO: 5982 - RNA, 21 nt, synthetic construct
  source 1..21: mol_type = other RNA
gcgaagcggccagggtccagc

SEQ ID NO: 5983 - RNA, 21 nt, synthetic construct
  source 1..21: mol_type = other RNA
gcgaaggaacgcgaacccgta

SEQ ID NO: 5984 - RNA, 21 nt, synthetic construct
  source 1..21: mol_type = other RNA
gcgacacaagccagggccgcg

SEQ ID NO: 5985 - RNA, 21 nt, synthetic construct
  source 1..21: mol_type = other RNA
gcgacgcatggtagagaagcg

SEQ ID NO: 5986 - RNA, 21 nt, synthetic construct
  source 1..21: mol_type = other RNA
gcgactaacaaggaggtggag

SEQ ID NO: 5987 - RNA, 21 nt, synthetic construct
  source 1..21: mol_type = other RNA
gcgagcgggaagagccactcg

SEQ ID NO: 5988 - RNA, 21 nt, synthetic construct
  source 1..21: mol_type = other RNA
gcgaggcaggcgtgcagccga

SEQ ID NO: 5989 - RNA, 21 nt, synthetic construct
  source 1..21: mol_type = other RNA
gcgaggccacaagcggctcca

SEQ ID NO: 5990 - RNA, 21 nt, synthetic construct
  source 1..21: mol_type = other RNA
gcgaggtggagcgctcgggca

SEQ ID NO: 5991 - RNA, 21 nt, synthetic construct
  source 1..21: mol_type = other RNA
gcgcagaggtagaaagccccg

SEQ ID NO: 5992 - RNA, 21 nt, synthetic construct
  source 1..21: mol_type = other RNA
gcgcagcagcgcggggtccgt

SEQ ID NO: 5993 - RNA, 21 nt, synthetic construct
  source 1..21: mol_type = other RNA
gcgcagccgagtggctcttcc

SEQ ID NO: 5994 - RNA, 21 nt, synthetic construct
  source 1..21: mol_type = other RNA
gcgcagtgcatcggggctttc

SEQ ID NO: 5995 - RNA, 21 nt, synthetic construct
  source 1..21: mol_type = other RNA
gcgcagtggcgcagcagcgcg

SEQ ID NO: 5996 - RNA, 21 nt, synthetic construct
  source 1..21: mol_type = other RNA
gcgcagttgcccagcgccagc

SEQ ID NO: 5997 - RNA, 21 nt, synthetic construct
  source 1..21: mol_type = other RNA
gcgcattgggctgggcgtgat

SEQ ID NO: 5998 - RNA, 21 nt, synthetic construct
  source 1..21: mol_type = other RNA
gcgccactgcgcgctggcgct

SEQ ID NO: 5999 - RNA, 21 nt, synthetic construct
  source 1..21: mol_type = other RNA
gcgccagcgcgcagtggcgca

SEQ ID NO: 6000 - RNA, 21 nt, synthetic construct
  source 1..21: mol_type = other RNA
gcgccagcgtgcccgagcgct

SEQ ID NO: 6001 - RNA, 21 nt, synthetic construct
  source 1..21: mol_type = other RNA
gcgccagctctacgggttcgc

SEQ ID NO: 6002 - RNA, 21 nt, synthetic construct
  source 1..21: mol_type = other RNA
gcgccgaggctgccatcaaga

SEQ ID NO: 6003 - RNA, 21 nt, synthetic construct
  source 1..21: mol_type = other RNA
gcgcctccaagcggttagagt

SEQ ID NO: 6004 - RNA, 21 nt, synthetic construct
  source 1..21: mol_type = other RNA
gcgcctcgtgccgttgctcga

SEQ ID NO: 6005 - RNA, 21 nt, synthetic construct
  source 1..21: mol_type = other RNA
gcgcgaggtggagcgctcggg

SEQ ID NO: 6006 - RNA, 21 nt, synthetic construct
  source 1..21: mol_type = other RNA
gcgcgcagccgagtggctctt

SEQ ID NO: 6007 - RNA, 21 nt, synthetic construct
  source 1..21: mol_type = other RNA
gcgcgcagtggcgcagcagcg

SEQ ID NO: 6008 - RNA, 21 nt, synthetic construct
  source 1..21: mol_type = other RNA
gcgcgcagttgcccagcgcca

SEQ ID NO: 6009 - RNA, 21 nt, synthetic construct
  source 1..21: mol_type = other RNA
gcgcgcattgggctgggcgtg

SEQ ID NO: 6010 - RNA, 21 nt, synthetic construct
  source 1..21: mol_type = other RNA
gcgcgctgcacgggggccagg

SEQ ID NO: 6011 - RNA, 21 nt, synthetic construct
  source 1..21: mol_type = other RNA
gcgcgctggcgctgggcaact

SEQ ID NO: 6012 - RNA, 21 nt, synthetic construct
  source 1..21: mol_type = other RNA
gcgcgcttctctaccatgcgt

SEQ ID NO: 6013 - RNA, 21 nt, synthetic construct
  source 1..21: mol_type = other RNA
gcgcggagcgtggcaggcatc

SEQ ID NO: 6014 - RNA, 21 nt, synthetic construct
  source 1..21: mol_type = other RNA
gcgcggggtccgtgcggcggc

SEQ ID NO: 6015 - RNA, 21 nt, synthetic construct
  source 1..21: mol_type = other RNA
gcgctccacctccttgttagt

SEQ ID NO: 6016 - RNA, 21 nt, synthetic construct
  source 1..21: mol_type = other RNA
gcgctccacctcgcgctccac

SEQ ID NO: 6017 - RNA, 21 nt, synthetic construct
  source 1..21: mol_type = other RNA
gcgctcgggcacgctggcgct

SEQ ID NO: 6018 - RNA, 21 nt, synthetic construct
  source 1..21: mol_type = other RNA
gcgctcgtggagccgcttgtg

SEQ ID NO: 6019 - RNA, 21 nt, synthetic construct
  source 1..21: mol_type = other RNA
gcgctgcacgggggccaggcg

SEQ ID NO: 6020 - RNA, 21 nt, synthetic construct
  source 1..21: mol_type = other RNA
gcgctgcaggtcgtcgggccc

SEQ ID NO: 6021 - RNA, 21 nt, synthetic construct
  source 1..21: mol_type = other RNA
gcgctgctgcgccactgcgcg

SEQ ID NO: 6022 - RNA, 21 nt, synthetic construct
  source 1..21: mol_type = other RNA
gcgctggcgctgggcaactgc

SEQ ID NO: 6023 - RNA, 21 nt, synthetic construct
  source 1..21: mol_type = other RNA
gcgctgggcaactgcgcgctg

SEQ ID NO: 6024 - RNA, 21 nt, synthetic construct
  source 1..21: mol_type = other RNA
gcgcttctctaccatgcgtcg

SEQ ID NO: 6025 - RNA, 21 nt, synthetic construct
  source 1..21: mol_type = other RNA
gcggagcgtggcaggcatctt

SEQ ID NO: 6026 - RNA, 21 nt, synthetic construct
  source 1..21: mol_type = other RNA
gcggcaccaatacagcaccgc

SEQ ID NO: 6027 - RNA, 21 nt, synthetic construct
  source 1..21: mol_type = other RNA
gcggccagggtccagcgaggc

SEQ ID NO: 6028 - RNA, 21 nt, synthetic construct
  source 1..21: mol_type = other RNA
gcggccctggcttgtgtcgct

SEQ ID NO: 6029 - RNA, 21 nt, synthetic construct
  source 1..21: mol_type = other RNA
gcggccggcggcctggacgcg

SEQ ID NO: 6030 - RNA, 21 nt, synthetic construct
  source 1..21: mol_type = other RNA
gcggcctggacgcggtgctgt

SEQ ID NO: 6031 - RNA, 21 nt, synthetic construct
  source 1..21: mol_type = other RNA
gcggcggcaccaatacagcac

SEQ ID NO: 6032 - RNA, 21 nt, synthetic construct
  source 1..21: mol_type = other RNA
gcggctccacgagcgccagcg

SEQ ID NO: 6033 - RNA, 21 nt, synthetic construct
  source 1..21: mol_type = other RNA
gcgggaagagccactcggctg

SEQ ID NO: 6034 - RNA, 21 nt, synthetic construct
  source 1..21: mol_type = other RNA
gcgggcccgacgacctgcagc

SEQ ID NO: 6035 - RNA, 21 nt, synthetic construct
  source 1..21: mol_type = other RNA
gcgggcgaagcggccagggtc

SEQ ID NO: 6036 - RNA, 21 nt, synthetic construct
  source 1..21: mol_type = other RNA
gcggggtccgtgcggcggcac

SEQ ID NO: 6037 - RNA, 21 nt, synthetic construct
  source 1..21: mol_type = other RNA
gcggtgcagcgacgcatggta

SEQ ID NO: 6038 - RNA, 21 nt, synthetic construct
  source 1..21: mol_type = other RNA
gcggtgctgtattggtgccgc

SEQ ID NO: 6039 - RNA, 21 nt, synthetic construct
  source 1..21: mol_type = other RNA
gcggtgttggcgactaacaag

SEQ ID NO: 6040 - RNA, 21 nt, synthetic construct
  source 1..21: mol_type = other RNA
gcggttagagtcgagcaacgg

SEQ ID NO: 6041 - RNA, 21 nt, synthetic construct
  source 1..21: mol_type = other RNA
gcgtccaccagacagcgggcg

SEQ ID NO: 6042 - RNA, 21 nt, synthetic construct
  source 1..21: mol_type = other RNA
gcgtccaggccgccggccgcc

SEQ ID NO: 6043 - RNA, 21 nt, synthetic construct
  source 1..21: mol_type = other RNA
gcgtcgctgcaccgcctggcc

SEQ ID NO: 6044 - RNA, 21 nt, synthetic construct
  source 1..21: mol_type = other RNA
gcgtgatcctgaacctggcga

SEQ ID NO: 6045 - RNA, 21 nt, synthetic construct
  source 1..21: mol_type = other RNA
gcgtgcagccgaagcagctcg

SEQ ID NO: 6046 - RNA, 21 nt, synthetic construct
  source 1..21: mol_type = other RNA
gcgtgcccgagcgctccacct

SEQ ID NO: 6047 - RNA, 21 nt, synthetic construct
  source 1..21: mol_type = other RNA
gcgtggcaggcatcttggagc

SEQ ID NO: 6048 - RNA, 21 nt, synthetic construct
  source 1..21: mol_type = other RNA
gcgtggcgcgcattgggctgg

SEQ ID NO: 6049 - RNA, 21 nt, synthetic construct
  source 1..21: mol_type = other RNA
gcgttccttcgccaggttcag

SEQ ID NO: 6050 - RNA, 21 nt, synthetic construct
  source 1..21: mol_type = other RNA
gctactgcgaggcaggcgtgc

SEQ ID NO: 6051 - RNA, 21 nt, synthetic construct
  source 1..21: mol_type = other RNA
gctccaagatgcctgccacgc

SEQ ID NO: 6052 - RNA, 21 nt, synthetic construct
  source 1..21: mol_type = other RNA
gctccacctccttgttagtcg

SEQ ID NO: 6053 - RNA, 21 nt, synthetic construct
  source 1..21: mol_type = other RNA
gctccacctcgcgctccacct

SEQ ID NO: 6054 - RNA, 21 nt, synthetic construct
  source 1..21: mol_type = other RNA
gctccacgagcgccagcgtgc

SEQ ID NO: 6055 - RNA, 21 nt, synthetic construct
  source 1..21: mol_type = other RNA
gctccgcgccagctctacggg

SEQ ID NO: 6056 - RNA, 21 nt, synthetic construct
  source 1..21: mol_type = other RNA
gctcgactctaaccgcttgga

SEQ ID NO: 6057 - RNA, 21 nt, synthetic construct
  source 1..21: mol_type = other RNA
gctcgccttctccaaggagga

SEQ ID NO: 6058 - RNA, 21 nt, synthetic construct
  source 1..21: mol_type = other RNA
gctcgggcacgctggcgctcg

SEQ ID NO: 6059 - RNA, 21 nt, synthetic construct
  source 1..21: mol_type = other RNA
gctcgtcctccttggagaagg

SEQ ID NO: 6060 - RNA, 21 nt, synthetic construct
  source 1..21: mol_type = other RNA
gctcgtggagccgcttgtggc

SEQ ID NO: 6061 - RNA, 21 nt, synthetic construct
  source 1..21: mol_type = other RNA
gctctacgggttcgcgttcct

SEQ ID NO: 6062 - RNA, 21 nt, synthetic construct
  source 1..21: mol_type = other RNA
gctcttcccgctcgccttctc

SEQ ID NO: 6063 - RNA, 21 nt, synthetic construct
  source 1..21: mol_type = other RNA
gctcttgatggcagcctcggc

SEQ ID NO: 6064 - RNA, 21 nt, synthetic construct
  source 1..21: mol_type = other RNA
gctgcaccgcctggcccccgt

SEQ ID NO: 6065 - RNA, 21 nt, synthetic construct
  source 1..21: mol_type = other RNA
gctgcacgcctgcctcgcagt

SEQ ID NO: 6066 - RNA, 21 nt, synthetic construct
  source 1..21: mol_type = other RNA
gctgcacgggggccaggcggt

SEQ ID NO: 6067 - RNA, 21 nt, synthetic construct
  source 1..21: mol_type = other RNA
gctgcaggtcgtcgggcccgc

SEQ ID NO: 6068 - RNA, 21 nt, synthetic construct
  source 1..21: mol_type = other RNA
gctgccatcaagagcctgcaa

SEQ ID NO: 6069 - RNA, 21 nt, synthetic construct
  source 1..21: mol_type = other RNA
gctgcgccactgcgcgctggc

SEQ ID NO: 6070 - RNA, 21 nt, synthetic construct
  source 1..21: mol_type = other RNA
gctgcgcgcttctctaccatg

SEQ ID NO: 6071 - RNA, 21 nt, synthetic construct
  source 1..21: mol_type = other RNA
gctgctgcgccactgcgcgct

SEQ ID NO: 6072 - RNA, 21 nt, synthetic construct
  source 1..21: mol_type = other RNA
gctgcttcggctgcacgcctg

SEQ ID NO: 6073 - RNA, 21 nt, synthetic construct
  source 1..21: mol_type = other RNA
gctggaccctggccgcttcgc

SEQ ID NO: 6074 - RNA, 21 nt, synthetic construct
  source 1..21: mol_type = other RNA
gctggcgcggagcgtggcagg

SEQ ID NO: 6075 - RNA, 21 nt, synthetic construct
  source 1..21: mol_type = other RNA
gctggcgctcgtggagccgct

SEQ ID NO: 6076 - RNA, 21 nt, synthetic construct
  source 1..21: mol_type = other RNA
gctggcgctgggcaactgcgc

SEQ ID NO: 6077 - RNA, 21 nt, synthetic construct
  source 1..21: mol_type = other RNA
gctggcgtccaccagacagcg

SEQ ID NO: 6078 - RNA, 21 nt, synthetic construct
  source 1..21: mol_type = other RNA
gctgggcaactgcgcgctgca

SEQ ID NO: 6079 - RNA, 21 nt, synthetic construct
  source 1..21: mol_type = other RNA
gctgggcgtgatcctgaacct

SEQ ID NO: 6080 - RNA, 21 nt, synthetic construct
  source 1..21: mol_type = other RNA
gctggtggcggccggcggcct

SEQ ID NO: 6081 - RNA, 21 nt, synthetic construct
  source 1..21: mol_type = other RNA
gctgtattggtgccgccgcac

SEQ ID NO: 6082 - RNA, 21 nt, synthetic construct
  source 1..21: mol_type = other RNA
gctgtctggtggacgccagcg

SEQ ID NO: 6083 - RNA, 21 nt, synthetic construct
  source 1..21: mol_type = other RNA
gcttcgcccgctgtctggtgg

SEQ ID NO: 6084 - RNA, 21 nt, synthetic construct
  source 1..21: mol_type = other RNA
gcttcggctgcacgcctgcct

SEQ ID NO: 6085 - RNA, 21 nt, synthetic construct
  source 1..21: mol_type = other RNA
gcttctctaccatgcgtcgct

SEQ ID NO: 6086 - RNA, 21 nt, synthetic construct
  source 1..21: mol_type = other RNA
gcttgaacatgtgctccaaga

SEQ ID NO: 6087 - RNA, 21 nt, synthetic construct
  source 1..21: mol_type = other RNA
gcttggaggcgcagtgcatcg

SEQ ID NO: 6088 - RNA, 21 nt, synthetic construct
  source 1..21: mol_type = other RNA
gcttgtggcctcgctggaccc

SEQ ID NO: 6089 - RNA, 21 nt, synthetic construct
  source 1..21: mol_type = other RNA
gcttgtgtcgctggcgtccac

SEQ ID NO: 6090 - RNA, 21 nt, synthetic construct
  source 1..21: mol_type = other RNA
gctttctacctctgcgccgag

SEQ ID NO: 6091 - RNA, 21 nt, synthetic construct
  source 1..21: mol_type = other RNA
ggaacgcgaacccgtagagct

SEQ ID NO: 6092 - RNA, 21 nt, synthetic construct
  source 1..21: mol_type = other RNA
ggaagagccactcggctgcgc

SEQ ID NO: 6093 - RNA, 21 nt, synthetic construct
  source 1..21: mol_type = other RNA
ggaccccgcgctgctgcgcca

SEQ ID NO: 6094 - RNA, 21 nt, synthetic construct
  source 1..21: mol_type = other RNA
ggaccctggccgcttcgcccg

SEQ ID NO: 6095 - RNA, 21 nt, synthetic construct
  source 1..21: mol_type = other RNA
ggacgagctgcttcggctgca

SEQ ID NO: 6096 - RNA, 21 nt, synthetic construct
  source 1..21: mol_type = other RNA
ggacgccagcgacacaagcca

SEQ ID NO: 6097 - RNA, 21 nt, synthetic construct
  source 1..21: mol_type = other RNA
ggacgcggtgctgtattggtg

SEQ ID NO: 6098 - RNA, 21 nt, synthetic construct
  source 1..21: mol_type = other RNA
ggagaaggcgagcgggaagag

SEQ ID NO: 6099 - RNA, 21 nt, synthetic construct
  source 1..21: mol_type = other RNA
ggagacatgccagaggctggt

SEQ ID NO: 6100 - RNA, 21 nt, synthetic construct
  source 1..21: mol_type = other RNA
ggagcacatgttcaagcattc

SEQ ID NO: 6101 - RNA, 21 nt, synthetic construct
  source 1..21: mol_type = other RNA
ggagccgcttgtggcctcgct

SEQ ID NO: 6102 - RNA, 21 nt, synthetic construct
  source 1..21: mol_type = other RNA
ggagcgcgaggtggagcgctc

SEQ ID NO: 6103 - RNA, 21 nt, synthetic construct
  source 1..21: mol_type = other RNA
ggagcgctcgggcacgctggc

SEQ ID NO: 6104 - RNA, 21 nt, synthetic construct
  source 1..21: mol_type = other RNA
ggagcgtggcaggcatcttgg

SEQ ID NO: 6105 - RNA, 21 nt, synthetic construct
  source 1..21: mol_type = other RNA
ggaggacgagctgcttcggct

SEQ ID NO: 6106 - RNA, 21 nt, synthetic construct
  source 1..21: mol_type = other RNA
ggaggagacatgccagaggct

SEQ ID NO: 6107 - RNA, 21 nt, synthetic construct
  source 1..21: mol_type = other RNA
ggaggcgcagtgcatcggggc

SEQ ID NO: 6108 - RNA, 21 nt, synthetic construct
  source 1..21: mol_type = other RNA
ggaggtggagcgcgaggtgga

SEQ ID NO: 6109 - RNA, 21 nt, synthetic construct
  source 1..21: mol_type = other RNA
ggatcacgcccagcccaatgc

SEQ ID NO: 6110 - RNA, 21 nt, synthetic construct
  source 1..21: mol_type = other RNA
ggcaactgcgcgctgcacggg

SEQ ID NO: 6111 - RNA, 21 nt, synthetic construct
  source 1..21: mol_type = other RNA
ggcaagaccaaggtgggtgca

SEQ ID NO: 6112 - RNA, 21 nt, synthetic construct
  source 1..21: mol_type = other RNA
ggcaccaatacagcaccgcgt

SEQ ID NO: 6113 - RNA, 21 nt, synthetic construct
  source 1..21: mol_type = other RNA
ggcacgaggcgctgcaggtcg

SEQ ID NO: 6114 - RNA, 21 nt, synthetic construct
  source 1..21: mol_type = other RNA
ggcacgctggcgctcgtggag

SEQ ID NO: 6115 - RNA, 21 nt, synthetic construct
  source 1..21: mol_type = other RNA
ggcagcctcggcgcagaggta

SEQ ID NO: 6116 - RNA, 21 nt, synthetic construct
  source 1..21: mol_type = other RNA
ggcaggcatcttggagcacat

SEQ ID NO: 6117 - RNA, 21 nt, synthetic construct
  source 1..21: mol_type = other RNA
ggcaggcgtgcagccgaagca

SEQ ID NO: 6118 - RNA, 21 nt, synthetic construct
  source 1..21: mol_type = other RNA
ggcatcttggagcacatgttc

SEQ ID NO: 6119 - RNA, 21 nt, synthetic construct
  source 1..21: mol_type = other RNA
ggcatgtctcctccgaatgct

SEQ ID NO: 6120 - RNA, 21 nt, synthetic construct
  source 1..21: mol_type = other RNA
ggccacaagcggctccacgag

SEQ ID NO: 6121 - RNA, 21 nt, synthetic construct
  source 1..21: mol_type = other RNA
ggccaggcggtgcagcgacgc

SEQ ID NO: 6122 - RNA, 21 nt, synthetic construct
  source 1..21: mol_type = other RNA
ggccagggtccagcgaggcca

SEQ ID NO: 6123 - RNA, 21 nt, synthetic construct
  source 1..21: mol_type = other RNA
ggcccccgtgcagcgcgcagt

SEQ ID NO: 6124 - RNA, 21 nt, synthetic construct
  source 1..21: mol_type = other RNA
ggcccgacgacctgcagcgcc

SEQ ID NO: 6125 - RNA, 21 nt, synthetic construct
  source 1..21: mol_type = other RNA
ggcccgcggccctggcttgtg

SEQ ID NO: 6126 - RNA, 21 nt, synthetic construct
  source 1..21: mol_type = other RNA
ggccctggcttgtgtcgctgg

SEQ ID NO: 6127 - RNA, 21 nt, synthetic construct
  source 1..21: mol_type = other RNA
ggccgccaccagcctctggca

SEQ ID NO: 6128 - RNA, 21 nt, synthetic construct
  source 1..21: mol_type = other RNA
ggccgccggccgccaccagcc

SEQ ID NO: 6129 - RNA, 21 nt, synthetic construct
  source 1..21: mol_type = other RNA
ggccgcgggcccgacgacctg

SEQ ID NO: 6130 - RNA, 21 nt, synthetic construct
  source 1..21: mol_type = other RNA
ggccgcttcgcccgctgtctg

SEQ ID NO: 6131 - RNA, 21 nt, synthetic construct
  source 1..21: mol_type = other RNA
ggccggcggcctggacgcggt

SEQ ID NO: 6132 - RNA, 21 nt, synthetic construct
  source 1..21: mol_type = other RNA
ggcctcgctggaccctggccg

SEQ ID NO: 6133 - RNA, 21 nt, synthetic construct
  source 1..21: mol_type = other RNA
ggcctggacgcggtgctgtat

SEQ ID NO: 6134 - RNA, 21 nt, synthetic construct
  source 1..21: mol_type = other RNA
ggcgaagcggccagggtccag

SEQ ID NO: 6135 - RNA, 21 nt, synthetic construct
  source 1..21: mol_type = other RNA
ggcgaaggaacgcgaacccgt

SEQ ID NO: 6136 - RNA, 21 nt, synthetic construct
  source 1..21: mol_type = other RNA
ggcgactaacaaggaggtgga

SEQ ID NO: 6137 - RNA, 21 nt, synthetic construct
  source 1..21: mol_type = other RNA
ggcgagcgggaagagccactc

SEQ ID NO: 6138 - RNA, 21 nt, synthetic construct
  source 1..21: mol_type = other RNA
ggcgcagaggtagaaagcccc

SEQ ID NO: 6139 - RNA, 21 nt, synthetic construct
  source 1..21: mol_type = other RNA
ggcgcagcagcgcggggtccg

SEQ ID NO: 6140 - RNA, 21 nt, synthetic construct
  source 1..21: mol_type = other RNA
ggcgcagtgcatcggggcttt

SEQ ID NO: 6141 - RNA, 21 nt, synthetic construct
  source 1..21: mol_type = other RNA
ggcgcgcattgggctgggcgt

SEQ ID NO: 6142 - RNA, 21 nt, synthetic construct
  source 1..21: mol_type = other RNA
ggcgcggagcgtggcaggcat

SEQ ID NO: 6143 - RNA, 21 nt, synthetic construct
  source 1..21: mol_type = other RNA
ggcgctcgtggagccgcttgt

SEQ ID NO: 6144 - RNA, 21 nt, synthetic construct
  source 1..21: mol_type = other RNA
ggcgctgcaggtcgtcgggcc

SEQ ID NO: 6145 - RNA, 21 nt, synthetic construct
  source 1..21: mol_type = other RNA
ggcgctgggcaactgcgcgct

SEQ ID NO: 6146 - RNA, 21 nt, synthetic construct
  source 1..21: mol_type = other RNA
ggcggcaccaatacagcaccg

SEQ ID NO: 6147 - RNA, 21 nt, synthetic construct
  source 1..21: mol_type = other RNA
ggcggccggcggcctggacgc

SEQ ID NO: 6148 - RNA, 21 nt, synthetic construct
  source 1..21: mol_type = other RNA
ggcggcctggacgcggtgctg

SEQ ID NO: 6149 - RNA, 21 nt, synthetic construct
  source 1..21: mol_type = other RNA
ggcggtgcagcgacgcatggt

SEQ ID NO: 6150 - RNA, 21 nt, synthetic construct
  source 1..21: mol_type = other RNA
ggcgtccaccagacagcgggc

SEQ ID NO: 6151 - RNA, 21 nt, synthetic construct
  source 1..21: mol_type = other RNA
ggcgtgatcctgaacctggcg

SEQ ID NO: 6152 - RNA, 21 nt, synthetic construct
  source 1..21: mol_type = other RNA
ggcgtgcagccgaagcagctc

SEQ ID NO: 6153 - RNA, 21 nt, synthetic construct
  source 1..21: mol_type = other RNA
ggctccacgagcgccagcgtg

SEQ ID NO: 6154 - RNA, 21 nt, synthetic construct
  source 1..21: mol_type = other RNA
ggctcttcccgctcgccttct

SEQ ID NO: 6155 - RNA, 21 nt, synthetic construct
  source 1..21: mol_type = other RNA
ggctcttgatggcagcctcgg

SEQ ID NO: 6156 - RNA, 21 nt, synthetic construct
  source 1..21: mol_type = other RNA
ggctgcacgcctgcctcgcag

SEQ ID NO: 6157 - RNA, 21 nt, synthetic construct
  source 1..21: mol_type = other RNA
ggctgccatcaagagcctgca

SEQ ID NO: 6158 - RNA, 21 nt, synthetic construct
  source 1..21: mol_type = other RNA
ggctgcgcgcttctctaccat

SEQ ID NO: 6159 - RNA, 21 nt, synthetic construct
  source 1..21: mol_type = other RNA
ggctgggcgtgatcctgaacc

SEQ ID NO: 6160 - RNA, 21 nt, synthetic construct
  source 1..21: mol_type = other RNA
ggctggtggcggccggcggcc

SEQ ID NO: 6161 - RNA, 21 nt, synthetic construct
  source 1..21: mol_type = other RNA
ggcttgtgtcgctggcgtcca

SEQ ID NO: 6162 - RNA, 21 nt, synthetic construct
  source 1..21: mol_type = other RNA
ggctttctacctctgcgccga

SEQ ID NO: 6163 - RNA, 21 nt, synthetic construct
  source 1..21: mol_type = other RNA
gggaagagccactcggctgcg

SEQ ID NO: 6164 - RNA, 21 nt, synthetic construct
  source 1..21: mol_type = other RNA
gggcaactgcgcgctgcacgg

SEQ ID NO: 6165 - RNA, 21 nt, synthetic construct
  source 1..21: mol_type = other RNA
gggcacgctggcgctcgtgga

SEQ ID NO: 6166 - RNA, 21 nt, synthetic construct
  source 1..21: mol_type = other RNA
gggccaggcggtgcagcgacg

SEQ ID NO: 6167 - RNA, 21 nt, synthetic construct
  source 1..21: mol_type = other RNA
gggcccgacgacctgcagcgc

SEQ ID NO: 6168 - RNA, 21 nt, synthetic construct
  source 1..21: mol_type = other RNA
gggcccgcggccctggcttgt

SEQ ID NO: 6169 - RNA, 21 nt, synthetic construct
  source 1..21: mol_type = other RNA
gggccgcgggcccgacgacct

SEQ ID NO: 6170 - RNA, 21 nt, synthetic construct
  source 1..21: mol_type = other RNA
gggcgaagcggccagggtcca

SEQ ID NO: 6171 - RNA, 21 nt, synthetic construct
  source 1..21: mol_type = other RNA
gggcgtgatcctgaacctggc

SEQ ID NO: 6172 - RNA, 21 nt, synthetic construct
  source 1..21: mol_type = other RNA
gggctgggcgtgatcctgaac

SEQ ID NO: 6173 - RNA, 21 nt, synthetic construct
  source 1..21: mol_type = other RNA
gggctttctacctctgcgccg

SEQ ID NO: 6174 - RNA, 21 nt, synthetic construct
  source 1..21: mol_type = other RNA
ggggccaggcggtgcagcgac

SEQ ID NO: 6175 - RNA, 21 nt, synthetic construct
  source 1..21: mol_type = other RNA
ggggctttctacctctgcgcc

SEQ ID NO: 6176 - RNA, 21 nt, synthetic construct
  source 1..21: mol_type = other RNA
gggggccaggcggtgcagcga

SEQ ID NO: 6177 - RNA, 21 nt, synthetic construct
  source 1..21: mol_type = other RNA
ggggtccgtgcggcggcacca

SEQ ID NO: 6178 - RNA, 21 nt, synthetic construct
  source 1..21: mol_type = other RNA
gggtccagcgaggccacaagc

SEQ ID NO: 6179 - RNA, 21 nt, synthetic construct
  source 1..21: mol_type = other RNA
gggtccgtgcggcggcaccaa

SEQ ID NO: 6180 - RNA, 21 nt, synthetic construct
  source 1..21: mol_type = other RNA
gggttcgcgttccttcgccag

SEQ ID NO: 6181 - RNA, 21 nt, synthetic construct
  source 1..21: mol_type = other RNA
ggtagaaagccccgatgcact

SEQ ID NO: 6182 - RNA, 21 nt, synthetic construct
  source 1..21: mol_type = other RNA
ggtagagaagcgcgcagccga

SEQ ID NO: 6183 - RNA, 21 nt, synthetic construct
  source 1..21: mol_type = other RNA
ggtccagcgaggccacaagcg

SEQ ID NO: 6184 - RNA, 21 nt, synthetic construct
  source 1..21: mol_type = other RNA
ggtccgtgcggcggcaccaat

SEQ ID NO: 6185 - RNA, 21 nt, synthetic construct
  source 1..21: mol_type = other RNA
ggtcgtcgggcccgcggccct

SEQ ID NO: 6186 - RNA, 21 nt, synthetic construct
  source 1..21: mol_type = other RNA
ggtcttgccttgcaggctctt

SEQ ID NO: 6187 - RNA, 21 nt, synthetic construct
  source 1..21: mol_type = other RNA
ggtgcagcgacgcatggtaga

SEQ ID NO: 6188 - RNA, 21 nt, synthetic construct
  source 1..21: mol_type = other RNA
ggtgccgccgcacggaccccg

SEQ ID NO: 6189 - RNA, 21 nt, synthetic construct
  source 1..21: mol_type = other RNA
ggtgctgtattggtgccgccg

SEQ ID NO: 6190 - RNA, 21 nt, synthetic construct
  source 1..21: mol_type = other RNA
ggtggacgccagcgacacaag

SEQ ID NO: 6191 - RNA, 21 nt, synthetic construct
  source 1..21: mol_type = other RNA
ggtggagcgcgaggtggagcg

SEQ ID NO: 6192 - RNA, 21 nt, synthetic construct
  source 1..21: mol_type = other RNA
ggtggagcgctcgggcacgct

SEQ ID NO: 6193 - RNA, 21 nt, synthetic construct
  source 1..21: mol_type = other RNA
ggtggcggccggcggcctgga

SEQ ID NO: 6194 - RNA, 21 nt, synthetic construct
  source 1..21: mol_type = other RNA
ggtgggtgcagatgtggggtt

SEQ ID NO: 6195 - RNA, 21 nt, synthetic construct
  source 1..21: mol_type = other RNA
ggtgttggcgactaacaagga

SEQ ID NO: 6196 - RNA, 21 nt, synthetic construct
  source 1..21: mol_type = other RNA
ggttagagtcgagcaacggca

SEQ ID NO: 6197 - RNA, 21 nt, synthetic construct
  source 1..21: mol_type = other RNA
ggttcaggatcacgcccagcc

SEQ ID NO: 6198 - RNA, 21 nt, synthetic construct
  source 1..21: mol_type = other RNA
ggttcgcgttccttcgccagg

SEQ ID NO: 6199 - RNA, 21 nt, synthetic construct
  source 1..21: mol_type = other RNA
gtagaaagccccgatgcactg

SEQ ID NO: 6200 - RNA, 21 nt, synthetic construct
  source 1..21: mol_type = other RNA
gtagagaagcgcgcagccgag

SEQ ID NO: 6201 - RNA, 21 nt, synthetic construct
  source 1..21: mol_type = other RNA
gtagagctggcgcggagcgtg

SEQ ID NO: 6202 - RNA, 21 nt, synthetic construct
  source 1..21: mol_type = other RNA
gtagcggtgttggcgactaac

SEQ ID NO: 6203 - RNA, 21 nt, synthetic construct
  source 1..21: mol_type = other RNA
gtattggtgccgccgcacgga

SEQ ID NO: 6204 - RNA, 21 nt, synthetic construct
  source 1..21: mol_type = other RNA
gtccaccagacagcgggcgaa

SEQ ID NO: 6205 - RNA, 21 nt, synthetic construct
  source 1..21: mol_type = other RNA
gtccagcgaggccacaagcgg

SEQ ID NO: 6206 - RNA, 21 nt, synthetic construct
  source 1..21: mol_type = other RNA
gtccaggccgccggccgccac

SEQ ID NO: 6207 - RNA, 21 nt, synthetic construct
  source 1..21: mol_type = other RNA
gtccgtgcggcggcaccaata

SEQ ID NO: 6208 - RNA, 21 nt, synthetic construct
  source 1..21: mol_type = other RNA
gtcctccttggagaaggcgag

SEQ ID NO: 6209 - RNA, 21 nt, synthetic construct
  source 1..21: mol_type = other RNA
gtcgagcaacggcacgaggcg

SEQ ID NO: 6210 - RNA, 21 nt, synthetic construct
  source 1..21: mol_type = other RNA
gtcgccaacaccgctactgcg

SEQ ID NO: 6211 - RNA, 21 nt, synthetic construct
  source 1..21: mol_type = other RNA
gtcgctgcaccgcctggcccc

SEQ ID NO: 6212 - RNA, 21 nt, synthetic construct
  source 1..21: mol_type = other RNA
gtcgctggcgtccaccagaca

SEQ ID NO: 6213 - RNA, 21 nt, synthetic construct
  source 1..21: mol_type = other RNA
gtcgggcccgcggccctggct

SEQ ID NO: 6214 - RNA, 21 nt, synthetic construct
  source 1..21: mol_type = other RNA
gtcgtcgggcccgcggccctg

SEQ ID NO: 6215 - RNA, 21 nt, synthetic construct
  source 1..21: mol_type = other RNA
gtctcctccgaatgcttgaac

SEQ ID NO: 6216 - RNA, 21 nt, synthetic construct
  source 1..21: mol_type = other RNA
gtctggtggacgccagcgaca

SEQ ID NO: 6217 - RNA, 21 nt, synthetic construct
  source 1..21: mol_type = other RNA
gtcttgccttgcaggctcttg

SEQ ID NO: 6218 - RNA, 21 nt, synthetic construct
  source 1..21: mol_type = other RNA
gtgatcctgaacctggcgaag

SEQ ID NO: 6219 - RNA, 21 nt, synthetic construct
  source 1..21: mol_type = other RNA
gtgcagccgaagcagctcgtc

SEQ ID NO: 6220 - RNA, 21 nt, synthetic construct
  source 1..21: mol_type = other RNA
gtgcagcgacgcatggtagag

SEQ ID NO: 6221 - RNA, 21 nt, synthetic construct
  source 1..21: mol_type = other RNA
gtgcagcgcgcagttgcccag

SEQ ID NO: 6222 - RNA, 21 nt, synthetic construct
  source 1..21: mol_type = other RNA
gtgcatcggggctttctacct

SEQ ID NO: 6223 - RNA, 21 nt, synthetic construct
  source 1..21: mol_type = other RNA
gtgcccgagcgctccacctcg

SEQ ID NO: 6224 - RNA, 21 nt, synthetic construct
  source 1..21: mol_type = other RNA
gtgccgccgcacggaccccgc

SEQ ID NO: 6225 - RNA, 21 nt, synthetic construct
  source 1..21: mol_type = other RNA
gtgccgttgctcgactctaac

SEQ ID NO: 6226 - RNA, 21 nt, synthetic construct
  source 1..21: mol_type = other RNA
gtgcggcggcaccaatacagc

SEQ ID NO: 6227 - RNA, 21 nt, synthetic construct
  source 1..21: mol_type = other RNA
gtgctccaagatgcctgccac

SEQ ID NO: 6228 - RNA, 21 nt, synthetic construct
  source 1..21: mol_type = other RNA
gtgctgtattggtgccgccgc

SEQ ID NO: 6229 - RNA, 21 nt, synthetic construct
  source 1..21: mol_type = other RNA
gtggacgccagcgacacaagc

SEQ ID NO: 6230 - RNA, 21 nt, synthetic construct
  source 1..21: mol_type = other RNA
gtggagccgcttgtggcctcg

SEQ ID NO: 6231 - RNA, 21 nt, synthetic construct
  source 1..21: mol_type = other RNA
gtggagcgcgaggtggagcgc

SEQ ID NO: 6232 - RNA, 21 nt, synthetic construct
  source 1..21: mol_type = other RNA
gtggagcgctcgggcacgctg

SEQ ID NO: 6233 - RNA, 21 nt, synthetic construct
  source 1..21: mol_type = other RNA
gtggcaggcatcttggagcac

SEQ ID NO: 6234 - RNA, 21 nt, synthetic construct
  source 1..21: mol_type = other RNA
gtggcctcgctggaccctggc

SEQ ID NO: 6235 - RNA, 21 nt, synthetic construct
  source 1..21: mol_type = other RNA
gtggcgcagcagcgcggggtc

SEQ ID NO: 6236 - RNA, 21 nt, synthetic construct
  source 1..21: mol_type = other RNA
gtggcgcgcattgggctgggc

SEQ ID NO: 6237 - RNA, 21 nt, synthetic construct
  source 1..21: mol_type = other RNA
gtggcggccggcggcctggac

SEQ ID NO: 6238 - RNA, 21 nt, synthetic construct
  source 1..21: mol_type = other RNA
gtggctcttcccgctcgcctt

SEQ ID NO: 6239 - RNA, 21 nt, synthetic construct
  source 1..21: mol_type = other RNA
gtgggtgcagatgtggggttg

SEQ ID NO: 6240 - RNA, 21 nt, synthetic construct
  source 1..21: mol_type = other RNA
gtgtcgctggcgtccaccaga

SEQ ID NO: 6241 - RNA, 21 nt, synthetic construct
  source 1..21: mol_type = other RNA
gtgttggcgactaacaaggag

SEQ ID NO: 6242 - RNA, 21 nt, synthetic construct
  source 1..21: mol_type = other RNA
gttagagtcgagcaacggcac

SEQ ID NO: 6243 - RNA, 21 nt, synthetic construct
  source 1..21: mol_type = other RNA
gttagtcgccaacaccgctac

SEQ ID NO: 6244 - RNA, 21 nt, synthetic construct
  source 1..21: mol_type = other RNA
gttcaagcattcggaggagac

SEQ ID NO: 6245 - RNA, 21 nt, synthetic construct
  source 1..21: mol_type = other RNA
gttcaggatcacgcccagccc

SEQ ID NO: 6246 - RNA, 21 nt, synthetic construct
  source 1..21: mol_type = other RNA
gttccttcgccaggttcagga

SEQ ID NO: 6247 - RNA, 21 nt, synthetic construct
  source 1..21: mol_type = other RNA
gttcgcgttccttcgccaggt

SEQ ID NO: 6248 - RNA, 21 nt, synthetic construct
  source 1..21: mol_type = other RNA
gttgcccagcgccagcgcgca

SEQ ID NO: 6249 - RNA, 21 nt, synthetic construct
  source 1..21: mol_type = other RNA
gttgctcgactctaaccgctt

SEQ ID NO: 6250 - RNA, 21 nt, synthetic construct
  source 1..21: mol_type = other RNA
gttggcgactaacaaggaggt

SEQ ID NO: 6251 - RNA, 21 nt, synthetic construct
  source 1..21: mol_type = other RNA
taacaaggaggtggagcgcga

SEQ ID NO: 6252 - RNA, 21 nt, synthetic construct
  source 1..21: mol_type = other RNA
taaccgcttggaggcgcagtg

SEQ ID NO: 6253 - RNA, 21 nt, synthetic construct
  source 1..21: mol_type = other RNA
tacagcaccgcgtccaggccg

SEQ ID NO: 6254 - RNA, 21 nt, synthetic construct
  source 1..21: mol_type = other RNA
taccatgcgtcgctgcaccgc

SEQ ID NO: 6255 - RNA, 21 nt, synthetic construct
  source 1..21: mol_type = other RNA
tacctctgcgccgaggctgcc

SEQ ID NO: 6256 - RNA, 21 nt, synthetic construct
  source 1..21: mol_type = other RNA
tacgggttcgcgttccttcgc

SEQ ID NO: 6257 - RNA, 21 nt, synthetic construct
  source 1..21: mol_type = other RNA
tactgcgaggcaggcgtgcag

SEQ ID NO: 6258 - RNA, 21 nt, synthetic construct
  source 1..21: mol_type = other RNA
tagaaagccccgatgcactgc

SEQ ID NO: 6259 - RNA, 21 nt, synthetic construct
  source 1..21: mol_type = other RNA
tagagaagcgcgcagccgagt

SEQ ID NO: 6260 - RNA, 21 nt, synthetic construct
  source 1..21: mol_type = other RNA
tagagctggcgcggagcgtgg

SEQ ID NO: 6261 - RNA, 21 nt, synthetic construct
  source 1..21: mol_type = other RNA
tagagtcgagcaacggcacga

SEQ ID NO: 6262 - RNA, 21 nt, synthetic construct
  source 1..21: mol_type = other RNA
tagcggtgttggcgactaaca

SEQ ID NO: 6263 - RNA, 21 nt, synthetic construct
  source 1..21: mol_type = other RNA
tagtcgccaacaccgctactg

SEQ ID NO: 6264 - RNA, 21 nt, synthetic construct
  source 1..21: mol_type = other RNA
tattggtgccgccgcacggac

SEQ ID NO: 6265 - RNA, 21 nt, synthetic construct
  source 1..21: mol_type = other RNA
tcaagagcctgcaaggcaaga

SEQ ID NO: 6266 - RNA, 21 nt, synthetic construct
  source 1..21: mol_type = other RNA
tcaagcattcggaggagacat

SEQ ID NO: 6267 - RNA, 21 nt, synthetic construct
  source 1..21: mol_type = other RNA
tcacgcccagcccaatgcgcg

SEQ ID NO: 6268 - RNA, 21 nt, synthetic construct
  source 1..21: mol_type = other RNA
tcaggatcacgcccagcccaa

SEQ ID NO: 6269 - RNA, 21 nt, synthetic construct
  source 1..21: mol_type = other RNA
tccaagatgcctgccacgctc

SEQ ID NO: 6270 - RNA, 21 nt, synthetic construct
  source 1..21: mol_type = other RNA
tccaagcggttagagtcgagc

SEQ ID NO: 6271 - RNA, 21 nt, synthetic construct
  source 1..21: mol_type = other RNA
tccaaggaggacgagctgctt

SEQ ID NO: 6272 - RNA, 21 nt, synthetic construct
  source 1..21: mol_type = other RNA
tccaccagacagcgggcgaag

SEQ ID NO: 6273 - RNA, 21 nt, synthetic construct
  source 1..21: mol_type = other RNA
tccacccaaccccacatctgc

SEQ ID NO: 6274 - RNA, 21 nt, synthetic construct
  source 1..21: mol_type = other RNA
tccacctccttgttagtcgcc

SEQ ID NO: 6275 - RNA, 21 nt, synthetic construct
  source 1..21: mol_type = other RNA
tccacctcgcgctccacctcc

SEQ ID NO: 6276 - RNA, 21 nt, synthetic construct
  source 1..21: mol_type = other RNA
tccacgagcgccagcgtgccc

SEQ ID NO: 6277 - RNA, 21 nt, synthetic construct
  source 1..21: mol_type = other RNA
tccagcgaggccacaagcggc

SEQ ID NO: 6278 - RNA, 21 nt, synthetic construct
  source 1..21: mol_type = other RNA
tccaggccgccggccgccacc

SEQ ID NO: 6279 - RNA, 21 nt, synthetic construct
  source 1..21: mol_type = other RNA
tcccgctcgccttctccaagg

SEQ ID NO: 6280 - RNA, 21 nt, synthetic construct
  source 1..21: mol_type = other RNA
tccgaatgcttgaacatgtgc

SEQ ID NO: 6281 - RNA, 21 nt, synthetic construct
  source 1..21: mol_type = other RNA
tccgcgccagctctacgggtt

SEQ ID NO: 6282 - RNA, 21 nt, synthetic construct
  source 1..21: mol_type = other RNA
tccgtgcggcggcaccaatac

SEQ ID NO: 6283 - RNA, 21 nt, synthetic construct
  source 1..21: mol_type = other RNA
tcctccgaatgcttgaacatg

SEQ ID NO: 6284 - RNA, 21 nt, synthetic construct
  source 1..21: mol_type = other RNA
tcctccttggagaaggcgagc

SEQ ID NO: 6285 - RNA, 21 nt, synthetic construct
  source 1..21: mol_type = other RNA
tcctgaacctggcgaaggaac

SEQ ID NO: 6286 - RNA, 21 nt, synthetic construct
  source 1..21: mol_type = other RNA
tccttcgccaggttcaggatc

SEQ ID NO: 6287 - RNA, 21 nt, synthetic construct
  source 1..21: mol_type = other RNA
tccttggagaaggcgagcggg

SEQ ID NO: 6288 - RNA, 21 nt, synthetic construct
  source 1..21: mol_type = other RNA
tccttgttagtcgccaacacc

SEQ ID NO: 6289 - RNA, 21 nt, synthetic construct
  source 1..21: mol_type = other RNA
tcgactctaaccgcttggagg

SEQ ID NO: 6290 - RNA, 21 nt, synthetic construct
  source 1..21: mol_type = other RNA
tcgagcaacggcacgaggcgc

SEQ ID NO: 6291 - RNA, 21 nt, synthetic construct
  source 1..21: mol_type = other RNA
tcgcagtagcggtgttggcga

SEQ ID NO: 6292 - RNA, 21 nt, synthetic construct
  source 1..21: mol_type = other RNA
tcgccaacaccgctactgcga

SEQ ID NO: 6293 - RNA, 21 nt, synthetic construct
  source 1..21: mol_type = other RNA
tcgccaggttcaggatcacgc

SEQ ID NO: 6294 - RNA, 21 nt, synthetic construct
  source 1..21: mol_type = other RNA
tcgcccgctgtctggtggacg

SEQ ID NO: 6295 - RNA, 21 nt, synthetic construct
  source 1..21: mol_type = other RNA
tcgccttctccaaggaggacg

SEQ ID NO: 6296 - RNA, 21 nt, synthetic construct
  source 1..21: mol_type = other RNA
tcgcgctccacctccttgtta

SEQ ID NO: 6297 - RNA, 21 nt, synthetic construct
  source 1..21: mol_type = other RNA
tcgcgttccttcgccaggttc

SEQ ID NO: 6298 - RNA, 21 nt, synthetic construct
  source 1..21: mol_type = other RNA
tcgctgcaccgcctggccccc

SEQ ID NO: 6299 - RNA, 21 nt, synthetic construct
  source 1..21: mol_type = other RNA
tcgctggaccctggccgcttc

SEQ ID NO: 6300 - RNA, 21 nt, synthetic construct
  source 1..21: mol_type = other RNA
tcgctggcgtccaccagacag

SEQ ID NO: 6301 - RNA, 21 nt, synthetic construct
  source 1..21: mol_type = other RNA
tcggaggagacatgccagagg

SEQ ID NO: 6302 - RNA, 21 nt, synthetic construct
  source 1..21: mol_type = other RNA
tcggcgcagaggtagaaagcc

SEQ ID NO: 6303 - RNA, 21 nt, synthetic construct
  source 1..21: mol_type = other RNA
tcggctgcacgcctgcctcgc

SEQ ID NO: 6304 - RNA, 21 nt, synthetic construct
  source 1..21: mol_type = other RNA
tcggctgcgcgcttctctacc

SEQ ID NO: 6305 - RNA, 21 nt, synthetic construct
  source 1..21: mol_type = other RNA
tcgggcacgctggcgctcgtg

SEQ ID NO: 6306 - RNA, 21 nt, synthetic construct
  source 1..21: mol_type = other RNA
tcgggcccgcggccctggctt

SEQ ID NO: 6307 - RNA, 21 nt, synthetic construct
  source 1..21: mol_type = other RNA
tcggggctttctacctctgcg

SEQ ID NO: 6308 - RNA, 21 nt, synthetic construct
  source 1..21: mol_type = other RNA
tcgtcctccttggagaaggcg

SEQ ID NO: 6309 - RNA, 21 nt, synthetic construct
  source 1..21: mol_type = other RNA
tcgtcgggcccgcggccctgg

SEQ ID NO: 6310 - RNA, 21 nt, synthetic construct
  source 1..21: mol_type = other RNA
tcgtgccgttgctcgactcta

SEQ ID NO: 6311 - RNA, 21 nt, synthetic construct
  source 1..21: mol_type = other RNA
tcgtggagccgcttgtggcct

SEQ ID NO: 6312 - RNA, 21 nt, synthetic construct
  source 1..21: mol_type = other RNA
tctaaccgcttggaggcgcag

SEQ ID NO: 6313 - RNA, 21 nt, synthetic construct
  source 1..21: mol_type = other RNA
tctaccatgcgtcgctgcacc

SEQ ID NO: 6314 - RNA, 21 nt, synthetic construct
  source 1..21: mol_type = other RNA
tctacctctgcgccgaggctg

SEQ ID NO: 6315 - RNA, 21 nt, synthetic construct
  source 1..21: mol_type = other RNA
tctacgggttcgcgttccttc

SEQ ID NO: 6316 - RNA, 21 nt, synthetic construct
  source 1..21: mol_type = other RNA
tctccaaggaggacgagctgc

SEQ ID NO: 6317 - RNA, 21 nt, synthetic construct
  source 1..21: mol_type = other RNA
tctcctccgaatgcttgaaca

SEQ ID NO: 6318 - RNA, 21 nt, synthetic construct
  source 1..21: mol_type = other RNA
tctctaccatgcgtcgctgca

SEQ ID NO: 6319 - RNA, 21 nt, synthetic construct
  source 1..21: mol_type = other RNA
tctgcacccaccttggtcttg

SEQ ID NO: 6320 - RNA, 21 nt, synthetic construct
  source 1..21: mol_type = other RNA
tctgcgccgaggctgccatca

SEQ ID NO: 6321 - RNA, 21 nt, synthetic construct
  source 1..21: mol_type = other RNA
tctggcatgtctcctccgaat

SEQ ID NO: 6322 - RNA, 21 nt, synthetic construct
  source 1..21: mol_type = other RNA
tctggtggacgccagcgacac

SEQ ID NO: 6323 - RNA, 21 nt, synthetic construct
  source 1..21: mol_type = other RNA
tcttcccgctcgccttctcca

SEQ ID NO: 6324 - RNA, 21 nt, synthetic construct
  source 1..21: mol_type = other RNA
tcttgatggcagcctcggcgc

SEQ ID NO: 6325 - RNA, 21 nt, synthetic construct
  source 1..21: mol_type = other RNA
tcttgccttgcaggctcttga

SEQ ID NO: 6326 - RNA, 21 nt, synthetic construct
  source 1..21: mol_type = other RNA
tcttggagcacatgttcaagc

SEQ ID NO: 6327 - RNA, 21 nt, synthetic construct
  source 1..21: mol_type = other RNA
tgaacatgtgctccaagatgc

SEQ ID NO: 6328 - RNA, 21 nt, synthetic construct
  source 1..21: mol_type = other RNA
tgaacctggcgaaggaacgcg

SEQ ID NO: 6329 - RNA, 21 nt, synthetic construct
  source 1..21: mol_type = other RNA
tgatcctgaacctggcgaagg

SEQ ID NO: 6330 - RNA, 21 nt, synthetic construct
  source 1..21: mol_type = other RNA
tgatggcagcctcggcgcaga

SEQ ID NO: 6331 - RNA, 21 nt, synthetic construct
  source 1..21: mol_type = other RNA
tgcaaggcaagaccaaggtgg

SEQ ID NO: 6332 - RNA, 21 nt, synthetic construct
  source 1..21: mol_type = other RNA
tgcacccaccttggtcttgcc

SEQ ID NO: 6333 - RNA, 21 nt, synthetic construct
  source 1..21: mol_type = other RNA
tgcaccgcctggcccccgtgc

SEQ ID NO: 6334 - RNA, 21 nt, synthetic construct
  source 1..21: mol_type = other RNA
tgcacgcctgcctcgcagtag

SEQ ID NO: 6335 - RNA, 21 nt, synthetic construct
  source 1..21: mol_type = other RNA
tgcacgggggccaggcggtgc

SEQ ID NO: 6336 - RNA, 21 nt, synthetic construct
  source 1..21: mol_type = other RNA
tgcactgcgcctccaagcggt

SEQ ID NO: 6337 - RNA, 21 nt, synthetic construct
  source 1..21: mol_type = other RNA
tgcagccgaagcagctcgtcc

SEQ ID NO: 6338 - RNA, 21 nt, synthetic construct
  source 1..21: mol_type = other RNA
tgcagcgacgcatggtagaga

SEQ ID NO: 6339 - RNA, 21 nt, synthetic construct
  source 1..21: mol_type = other RNA
tgcagcgcctcgtgccgttgc

SEQ ID NO: 6340 - RNA, 21 nt, synthetic construct
  source 1..21: mol_type = other RNA
tgcagcgcgcagttgcccagc

SEQ ID NO: 6341 - RNA, 21 nt, synthetic construct
  source 1..21: mol_type = other RNA
tgcaggctcttgatggcagcc

SEQ ID NO: 6342 - RNA, 21 nt, synthetic construct
  source 1..21: mol_type = other RNA
tgcaggtcgtcgggcccgcgg

SEQ ID NO: 6343 - RNA, 21 nt, synthetic construct
  source 1..21: mol_type = other RNA
tgcatcggggctttctacctc

SEQ ID NO: 6344 - RNA, 21 nt, synthetic construct
  source 1..21: mol_type = other RNA
tgccacgctccgcgccagctc

SEQ ID NO: 6345 - RNA, 21 nt, synthetic construct
  source 1..21: mol_type = other RNA
tgccagaggctggtggcggcc

SEQ ID NO: 6346 - RNA, 21 nt, synthetic construct
  source 1..21: mol_type = other RNA
tgccatcaagagcctgcaagg

SEQ ID NO: 6347 - RNA, 21 nt, synthetic construct
  source 1..21: mol_type = other RNA
tgcccagcgccagcgcgcagt

SEQ ID NO: 6348 - RNA, 21 nt, synthetic construct
  source 1..21: mol_type = other RNA
tgcccgagcgctccacctcgc

SEQ ID NO: 6349 - RNA, 21 nt, synthetic construct
  source 1..21: mol_type = other RNA
tgccgccgcacggaccccgcg

SEQ ID NO: 6350 - RNA, 21 nt, synthetic construct
  source 1..21: mol_type = other RNA
tgccgttgctcgactctaacc

SEQ ID NO: 6351 - RNA, 21 nt, synthetic construct
  source 1..21: mol_type = other RNA
tgcctcgcagtagcggtgttg

SEQ ID NO: 6352 - RNA, 21 nt, synthetic construct
  source 1..21: mol_type = other RNA
tgcctgccacgctccgcgcca

SEQ ID NO: 6353 - RNA, 21 nt, synthetic construct
  source 1..21: mol_type = other RNA
tgccttgcaggctcttgatgg

SEQ ID NO: 6354 - RNA, 21 nt, synthetic construct
  source 1..21: mol_type = other RNA
tgcgaggcaggcgtgcagccg

SEQ ID NO: 6355 - RNA, 21 nt, synthetic construct
  source 1..21: mol_type = other RNA
tgcgccactgcgcgctggcgc

SEQ ID NO: 6356 - RNA, 21 nt, synthetic construct
  source 1..21: mol_type = other RNA
tgcgccgaggctgccatcaag

SEQ ID NO: 6357 - RNA, 21 nt, synthetic construct
  source 1..21: mol_type = other RNA
tgcgcctccaagcggttagag

SEQ ID NO: 6358 - RNA, 21 nt, synthetic construct
  source 1..21: mol_type = other RNA
tgcgcgctgcacgggggccag

SEQ ID NO: 6359 - RNA, 21 nt, synthetic construct
  source 1..21: mol_type = other RNA
tgcgcgctggcgctgggcaac

SEQ ID NO: 6360 - RNA, 21 nt, synthetic construct
  source 1..21: mol_type = other RNA
tgcgcgcttctctaccatgcg

SEQ ID NO: 6361 - RNA, 21 nt, synthetic construct
  source 1..21: mol_type = other RNA
tgcggcggcaccaatacagca

SEQ ID NO: 6362 - RNA, 21 nt, synthetic construct
  source 1..21: mol_type = other RNA
tgcgtcgctgcaccgcctggc

SEQ ID NO: 6363 - RNA, 21 nt, synthetic construct
  source 1..21: mol_type = other RNA
tgctccaagatgcctgccacg

SEQ ID NO: 6364 - RNA, 21 nt, synthetic construct
  source 1..21: mol_type = other RNA
tgctcgactctaaccgcttgg

SEQ ID NO: 6365 - RNA, 21 nt, synthetic construct
  source 1..21: mol_type = other RNA
tgctgcgccactgcgcgctgg

SEQ ID NO: 6366 - RNA, 21 nt, synthetic construct
  source 1..21: mol_type = other RNA
tgctgtattggtgccgccgca

SEQ ID NO: 6367 - RNA, 21 nt, synthetic construct
  source 1..21: mol_type = other RNA
tgcttcggctgcacgcctgcc

SEQ ID NO: 6368 - RNA, 21 nt, synthetic construct
  source 1..21: mol_type = other RNA
tgcttgaacatgtgctccaag

SEQ ID NO: 6369 - RNA, 21 nt, synthetic construct
  source 1..21: mol_type = other RNA
tggaccctggccgcttcgccc

SEQ ID NO: 6370 - RNA, 21 nt, synthetic construct
  source 1..21: mol_type = other RNA
tggacgccagcgacacaagcc

SEQ ID NO: 6371 - RNA, 21 nt, synthetic construct
  source 1..21: mol_type = other RNA
tggacgcggtgctgtattggt

SEQ ID NO: 6372 - RNA, 21 nt, synthetic construct
  source 1..21: mol_type = other RNA
tggagaaggcgagcgggaaga

SEQ ID NO: 6373 - RNA, 21 nt, synthetic construct
  source 1..21: mol_type = other RNA
tggagcacatgttcaagcatt

SEQ ID NO: 6374 - RNA, 21 nt, synthetic construct
  source 1..21: mol_type = other RNA
tggagccgcttgtggcctcgc

SEQ ID NO: 6375 - RNA, 21 nt, synthetic construct
  source 1..21: mol_type = other RNA
tggagcgcgaggtggagcgct

SEQ ID NO: 6376 - RNA, 21 nt, synthetic construct
  source 1..21: mol_type = other RNA
tggagcgctcgggcacgctgg

SEQ ID NO: 6377 - RNA, 21 nt, synthetic construct
  source 1..21: mol_type = other RNA
tggaggcgcagtgcatcgggg

SEQ ID NO: 6378 - RNA, 21 nt, synthetic construct
  source 1..21: mol_type = other RNA
tggcagcctcggcgcagaggt

SEQ ID NO: 6379 - RNA, 21 nt, synthetic construct
  source 1..21: mol_type = other RNA
tggcaggcatcttggagcaca

SEQ ID NO: 6380 - RNA, 21 nt, synthetic construct
  source 1..21: mol_type = other RNA
tggcatgtctcctccgaatgc

SEQ ID NO: 6381 - RNA, 21 nt, synthetic construct
  source 1..21: mol_type = other RNA
tggcccccgtgcagcgcgcag

SEQ ID NO: 6382 - RNA, 21 nt, synthetic construct
  source 1..21: mol_type = other RNA
tggccgcttcgcccgctgtct

SEQ ID NO: 6383 - RNA, 21 nt, synthetic construct
  source 1..21: mol_type = other RNA
tggcctcgctggaccctggcc

SEQ ID NO: 6384 - RNA, 21 nt, synthetic construct
  source 1..21: mol_type = other RNA
tggcgaaggaacgcgaacccg

SEQ ID NO: 6385 - RNA, 21 nt, synthetic construct
  source 1..21: mol_type = other RNA
tggcgactaacaaggaggtgg

SEQ ID NO: 6386 - RNA, 21 nt, synthetic construct
  source 1..21: mol_type = other RNA
tggcgcagcagcgcggggtcc

SEQ ID NO: 6387 - RNA, 21 nt, synthetic construct
  source 1..21: mol_type = other RNA
tggcgcgcattgggctgggcg

SEQ ID NO: 6388 - RNA, 21 nt, synthetic construct
  source 1..21: mol_type = other RNA
tggcgcggagcgtggcaggca

SEQ ID NO: 6389 - RNA, 21 nt, synthetic construct
  source 1..21: mol_type = other RNA
tggcgctcgtggagccgcttg

SEQ ID NO: 6390 - RNA, 21 nt, synthetic construct
  source 1..21: mol_type = other RNA
tggcgctgggcaactgcgcgc

SEQ ID NO: 6391 - RNA, 21 nt, synthetic construct
  source 1..21: mol_type = other RNA
tggcggccggcggcctggacg

SEQ ID NO: 6392 - RNA, 21 nt, synthetic construct
  source 1..21: mol_type = other RNA
tggcgtccaccagacagcggg

SEQ ID NO: 6393 - RNA, 21 nt, synthetic construct
  source 1..21: mol_type = other RNA
tggctcttcccgctcgccttc

SEQ ID NO: 6394 - RNA, 21 nt, synthetic construct
  source 1..21: mol_type = other RNA
tggcttgtgtcgctggcgtcc

SEQ ID NO: 6395 - RNA, 21 nt, synthetic construct
  source 1..21: mol_type = other RNA
tgggcaactgcgcgctgcacg

SEQ ID NO: 6396 - RNA, 21 nt, synthetic construct
  source 1..21: mol_type = other RNA
tgggcgtgatcctgaacctgg

SEQ ID NO: 6397 - RNA, 21 nt, synthetic construct
  source 1..21: mol_type = other RNA
tgggctgggcgtgatcctgaa

SEQ ID NO: 6398 - RNA, 21 nt, synthetic construct
  source 1..21: mol_type = other RNA
tggtagagaagcgcgcagccg

SEQ ID NO: 6399 - RNA, 21 nt, synthetic construct
  source 1..21: mol_type = other RNA
tggtcttgccttgcaggctct

SEQ ID NO: 6400 - RNA, 21 nt, synthetic construct
  source 1..21: mol_type = other RNA
tggtgccgccgcacggacccc

SEQ ID NO: 6401 - RNA, 21 nt, synthetic construct
  source 1..21: mol_type = other RNA
tggtggacgccagcgacacaa

SEQ ID NO: 6402 - RNA, 21 nt, synthetic construct
  source 1..21: mol_type = other RNA
tggtggcggccggcggcctgg

SEQ ID NO: 6403 - RNA, 21 nt, synthetic construct
  source 1..21: mol_type = other RNA
tgtattggtgccgccgcacgg

SEQ ID NO: 6404 - RNA, 21 nt, synthetic construct
  source 1..21: mol_type = other RNA
tgtcgctggcgtccaccagac

SEQ ID NO: 6405 - RNA, 21 nt, synthetic construct
  source 1..21: mol_type = other RNA
tgtctcctccgaatgcttgaa

SEQ ID NO: 6406 - RNA, 21 nt, synthetic construct
  source 1..21: mol_type = other RNA
tgtctggtggacgccagcgac

SEQ ID NO: 6407 - RNA, 21 nt, synthetic construct
  source 1..21: mol_type = other RNA
tgtgctccaagatgcctgcca

SEQ ID NO: 6408 - RNA, 21 nt, synthetic construct
  source 1..21: mol_type = other RNA
tgtggcctcgctggaccctgg

SEQ ID NO: 6409 - RNA, 21 nt, synthetic construct
  source 1..21: mol_type = other RNA
tgtgtcgctggcgtccaccag

SEQ ID NO: 6410 - RNA, 21 nt, synthetic construct
  source 1..21: mol_type = other RNA
tgttagtcgccaacaccgcta

SEQ ID NO: 6411 - RNA, 21 nt, synthetic construct
  source 1..21: mol_type = other RNA
tgttcaagcattcggaggaga

SEQ ID NO: 6412 - RNA, 21 nt, synthetic construct
  source 1..21: mol_type = other RNA
tgttggcgactaacaaggagg

SEQ ID NO: 6413 - RNA, 21 nt, synthetic construct
  source 1..21: mol_type = other RNA
ttagagtcgagcaacggcacg

SEQ ID NO: 6414 - RNA, 21 nt, synthetic construct
  source 1..21: mol_type = other RNA
ttagtcgccaacaccgctact

SEQ ID NO: 6415 - RNA, 21 nt, synthetic construct
  source 1..21: mol_type = other RNA
ttcaagcattcggaggagaca

SEQ ID NO: 6416 - RNA, 21 nt, synthetic construct
  source 1..21: mol_type = other RNA
ttcaggatcacgcccagccca

SEQ ID NO: 6417 - RNA, 21 nt, synthetic construct
  source 1..21: mol_type = other RNA
ttcccgctcgccttctccaag

SEQ ID NO: 6418 - RNA, 21 nt, synthetic construct
  source 1..21: mol_type = other RNA
ttccttcgccaggttcaggat

SEQ ID NO: 6419 - RNA, 21 nt, synthetic construct
  source 1..21: mol_type = other RNA
ttcgccaggttcaggatcacg

SEQ ID NO: 6420 - RNA, 21 nt, synthetic construct
  source 1..21: mol_type = other RNA
ttcgcccgctgtctggtggac

SEQ ID NO: 6421 - RNA, 21 nt, synthetic construct
  source 1..21: mol_type = other RNA
ttcgcgttccttcgccaggtt

SEQ ID NO: 6422 - RNA, 21 nt, synthetic construct
  source 1..21: mol_type = other RNA
ttcggaggagacatgccagag

SEQ ID NO: 6423 - RNA, 21 nt, synthetic construct
  source 1..21: mol_type = other RNA
ttcggctgcacgcctgcctcg

SEQ ID NO: 6424 - RNA, 21 nt, synthetic construct
  source 1..21: mol_type = other RNA
ttctacctctgcgccgaggct

SEQ ID NO: 6425 - RNA, 21 nt, synthetic construct
  source 1..21: mol_type = other RNA
ttctccaaggaggacgagctg

SEQ ID NO: 6426 - RNA, 21 nt, synthetic construct
  source 1..21: mol_type = other RNA
ttctctaccatgcgtcgctgc

SEQ ID NO: 6427 - RNA, 21 nt, synthetic construct
  source 1..21: mol_type = other RNA
ttgaacatgtgctccaagatg

SEQ ID NO: 6428 - RNA, 21 nt, synthetic construct
  source 1..21: mol_type = other RNA
ttgatggcagcctcggcgcag

SEQ ID NO: 6429 - RNA, 21 nt, synthetic construct
  source 1..21: mol_type = other RNA
ttgcaggctcttgatggcagc

SEQ ID NO: 6430 - RNA, 21 nt, synthetic construct
  source 1..21: mol_type = other RNA
ttgcccagcgccagcgcgcag

SEQ ID NO: 6431 - RNA, 21 nt, synthetic construct
  source 1..21: mol_type = other RNA
ttgccttgcaggctcttgatg

SEQ ID NO: 6432 - RNA, 21 nt, synthetic construct
  source 1..21: mol_type = other RNA
ttgctcgactctaaccgcttg

SEQ ID NO: 6433 - RNA, 21 nt, synthetic construct
  source 1..21: mol_type = other RNA
ttggagaaggcgagcgggaag

SEQ ID NO: 6434 - RNA, 21 nt, synthetic construct
  source 1..21: mol_type = other RNA
ttggagcacatgttcaagcat

SEQ ID NO: 6435 - RNA, 21 nt, synthetic construct
  source 1..21: mol_type = other RNA
ttggaggcgcagtgcatcggg

SEQ ID NO: 6436 - RNA, 21 nt, synthetic construct
  source 1..21: mol_type = other RNA
ttggcgactaacaaggaggtg

SEQ ID NO: 6437 - RNA, 21 nt, synthetic construct
  source 1..21: mol_type = other RNA
ttgggctgggcgtgatcctga

SEQ ID NO: 6438 - RNA, 21 nt, synthetic construct
  source 1..21: mol_type = other RNA
ttggtcttgccttgcaggctc

SEQ ID NO: 6439 - RNA, 21 nt, synthetic construct
  source 1..21: mol_type = other RNA
ttggtgccgccgcacggaccc

SEQ ID NO: 6440 - RNA, 21 nt, synthetic construct
  source 1..21: mol_type = other RNA
ttgtggcctcgctggaccctg

SEQ ID NO: 6441 - RNA, 21 nt, synthetic construct
  source 1..21: mol_type = other RNA
ttgtgtcgctggcgtccacca

SEQ ID NO: 6442 - RNA, 21 nt, synthetic construct
  source 1..21: mol_type = other RNA
ttgttagtcgccaacaccgct

SEQ ID NO: 6443 - RNA, 21 nt, synthetic construct
  source 1..21: mol_type = other RNA
tttctacctctgcgccgaggc

SEQ ID NO: 6444 - RNA, 22 nt, synthetic construct
  source 1..22: mol_type = other RNA
aaagccccgatgcactgcgcct

SEQ ID NO: 6445 - RNA, 22 nt, synthetic construct
  source 1..22: mol_type = other RNA
aacaaggaggtggagcgcgagg

SEQ ID NO: 6446 - RNA, 22 nt, synthetic construct
  source 1..22: mol_type = other RNA
aacaccgctactgcgaggcagg

SEQ ID NO: 6447 - RNA, 22 nt, synthetic construct
  source 1..22: mol_type = other RNA
aacatgtgctccaagatgcctg

SEQ ID NO: 6448 - RNA, 22 nt, synthetic construct
  source 1..22: mol_type = other RNA
aaccccacatctgcacccacct

SEQ ID NO: 6449 - RNA, 22 nt, synthetic construct
  source 1..22: mol_type = other RNA
aacccgtagagctggcgcggag

SEQ ID NO: 6450 - RNA, 22 nt, synthetic construct
  source 1..22: mol_type = other RNA
aaccgcttggaggcgcagtgca

SEQ ID NO: 6451 - RNA, 22 nt, synthetic construct
  source 1..22: mol_type = other RNA
aacctggcgaaggaacgcgaac

SEQ ID NO: 6452 - RNA, 22 nt, synthetic construct
  source 1..22: mol_type = other RNA
aacgcgaacccgtagagctggc

SEQ ID NO: 6453 - RNA, 22 nt, synthetic construct
  source 1..22: mol_type = other RNA
aacggcacgaggcgctgcaggt

SEQ ID NO: 6454 - RNA, 22 nt, synthetic construct
  source 1..22: mol_type = other RNA
aactgcgcgctgcacgggggcc

SEQ ID NO: 6455 - RNA, 22 nt, synthetic construct
  source 1..22: mol_type = other RNA
aagaccaaggtgggtgcagatg

SEQ ID NO: 6456 - RNA, 22 nt, synthetic construct
  source 1..22: mol_type = other RNA
aagagccactcggctgcgcgct

SEQ ID NO: 6457 - RNA, 22 nt, synthetic construct
  source 1..22: mol_type = other RNA
aagagcctgcaaggcaagacca

SEQ ID NO: 6458 - RNA, 22 nt, synthetic construct
  source 1..22: mol_type = other RNA
aagatgcctgccacgctccgcg

SEQ ID NO: 6459 - RNA, 22 nt, synthetic construct
  source 1..22: mol_type = other RNA
aagcagctcgtcctccttggag

SEQ ID NO: 6460 - RNA, 22 nt, synthetic construct
  source 1..22: mol_type = other RNA
aagcattcggaggagacatgcc

SEQ ID NO: 6461 - RNA, 22 nt, synthetic construct
  source 1..22: mol_type = other RNA
aagccagggccgcgggcccgac

SEQ ID NO: 6462 - RNA, 22 nt, synthetic construct
  source 1..22: mol_type = other RNA
aagccccgatgcactgcgcctc

SEQ ID NO: 6463 - RNA, 22 nt, synthetic construct
  source 1..22: mol_type = other RNA
aagcgcgcagccgagtggctct

SEQ ID NO: 6464 - RNA, 22 nt, synthetic construct
  source 1..22: mol_type = other RNA
aagcggccagggtccagcgagg

SEQ ID NO: 6465 - RNA, 22 nt, synthetic construct
  source 1..22: mol_type = other RNA
aagcggctccacgagcgccagc

SEQ ID NO: 6466 - RNA, 22 nt, synthetic construct
  source 1..22: mol_type = other RNA
aagcggttagagtcgagcaacg

SEQ ID NO: 6467 - RNA, 22 nt, synthetic construct
  source 1..22: mol_type = other RNA
aaggaacgcgaacccgtagagc

SEQ ID NO: 6468 - RNA, 22 nt, synthetic construct
  source 1..22: mol_type = other RNA
aaggaggacgagctgcttcggc

SEQ ID NO: 6469 - RNA, 22 nt, synthetic construct
  source 1..22: mol_type = other RNA
aaggaggtggagcgcgaggtgg

SEQ ID NO: 6470 - RNA, 22 nt, synthetic construct
  source 1..22: mol_type = other RNA
aaggcaagaccaaggtgggtgc

SEQ ID NO: 6471 - RNA, 22 nt, synthetic construct
  source 1..22: mol_type = other RNA
aaggcgagcgggaagagccact

SEQ ID NO: 6472 - RNA, 22 nt, synthetic construct
  source 1..22: mol_type = other RNA
aaggtgggtgcagatgtggggt

SEQ ID NO: 6473 - RNA, 22 nt, synthetic construct
  source 1..22: mol_type = other RNA
aatacagcaccgcgtccaggcc

SEQ ID NO: 6474 - RNA, 22 nt, synthetic construct
  source 1..22: mol_type = other RNA
aatgcttgaacatgtgctccaa

SEQ ID NO: 6475 - RNA, 22 nt, synthetic construct
  source 1..22: mol_type = other RNA
acaagccagggccgcgggcccg

SEQ ID NO: 6476 - RNA, 22 nt, synthetic construct
  source 1..22: mol_type = other RNA
acaagcggctccacgagcgcca

SEQ ID NO: 6477 - RNA, 22 nt, synthetic construct
  source 1..22: mol_type = other RNA
acaaggaggtggagcgcgaggt

SEQ ID NO: 6478 - RNA, 22 nt, synthetic construct
  source 1..22: mol_type = other RNA
acacaagccagggccgcgggcc

SEQ ID NO: 6479 - RNA, 22 nt, synthetic construct
  source 1..22: mol_type = other RNA
acaccgctactgcgaggcaggc

SEQ ID NO: 6480 - RNA, 22 nt, synthetic construct
  source 1..22: mol_type = other RNA
acagcaccgcgtccaggccgcc

SEQ ID NO: 6481 - RNA, 22 nt, synthetic construct
  source 1..22: mol_type = other RNA
acagcgggcgaagcggccaggg

SEQ ID NO: 6482 - RNA, 22 nt, synthetic construct
  source 1..22: mol_type = other RNA
acatctgcacccaccttggtct

SEQ ID NO: 6483 - RNA, 22 nt, synthetic construct
  source 1..22: mol_type = other RNA
acatgccagaggctggtggcgg

SEQ ID NO: 6484 - RNA, 22 nt, synthetic construct
  source 1..22: mol_type = other RNA
acatgtgctccaagatgcctgc

SEQ ID NO: 6485 - RNA, 22 nt, synthetic construct
  source 1..22: mol_type = other RNA
acatgttcaagcattcggagga

SEQ ID NO: 6486 - RNA, 22 nt, synthetic construct
  source 1..22: mol_type = other RNA
accaaggtgggtgcagatgtgg

SEQ ID NO: 6487 - RNA, 22 nt, synthetic construct
  source 1..22: mol_type = other RNA
accaatacagcaccgcgtccag

SEQ ID NO: 6488 - RNA, 22 nt, synthetic construct
  source 1..22: mol_type = other RNA
accagacagcgggcgaagcggc

SEQ ID NO: 6489 - RNA, 22 nt, synthetic construct
  source 1..22: mol_type = other RNA
accagcctctggcatgtctcct

SEQ ID NO: 6490 - RNA, 22 nt, synthetic construct
  source 1..22: mol_type = other RNA
accatgcgtcgctgcaccgcct

SEQ ID NO: 6491 - RNA, 22 nt, synthetic construct
  source 1..22: mol_type = other RNA
acccaaccccacatctgcaccc

SEQ ID NO: 6492 - RNA, 22 nt, synthetic construct
  source 1..22: mol_type = other RNA
acccaccttggtcttgccttgc

SEQ ID NO: 6493 - RNA, 22 nt, synthetic construct
  source 1..22: mol_type = other RNA
accccacatctgcacccacctt

SEQ ID NO: 6494 - RNA, 22 nt, synthetic construct
  source 1..22: mol_type = other RNA
accccgcgctgctgcgccactg

SEQ ID NO: 6495 - RNA, 22 nt, synthetic construct
  source 1..22: mol_type = other RNA
acccgtagagctggcgcggagc

SEQ ID NO: 6496 - RNA, 22 nt, synthetic construct
  source 1..22: mol_type = other RNA
accctggccgcttcgcccgctg

SEQ ID NO: 6497 - RNA, 22 nt, synthetic construct
  source 1..22: mol_type = other RNA
accgcctggcccccgtgcagcg

SEQ ID NO: 6498 - RNA, 22 nt, synthetic construct
  source 1..22: mol_type = other RNA
accgcgtccaggccgccggccg

SEQ ID NO: 6499 - RNA, 22 nt, synthetic construct
  source 1..22: mol_type = other RNA
accgcgtggcgcgcattgggct

SEQ ID NO: 6500 - RNA, 22 nt, synthetic construct
  source 1..22: mol_type = other RNA
accgctactgcgaggcaggcgt

SEQ ID NO: 6501 - RNA, 22 nt, synthetic construct
  source 1..22: mol_type = other RNA
accgcttggaggcgcagtgcat

SEQ ID NO: 6502 - RNA, 22 nt, synthetic construct
  source 1..22: mol_type = other RNA
acctccttgttagtcgccaaca

SEQ ID NO: 6503 - RNA, 22 nt, synthetic construct
  source 1..22: mol_type = other RNA
acctcgcgctccacctccttgt

SEQ ID NO: 6504 - RNA, 22 nt, synthetic construct
  source 1..22: mol_type = other RNA
acctctgcgccgaggctgccat

SEQ ID NO: 6505 - RNA, 22 nt, synthetic construct
  source 1..22: mol_type = other RNA
acctgcagcgcctcgtgccgtt

SEQ ID NO: 6506 - RNA, 22 nt, synthetic construct
  source 1..22: mol_type = other RNA
acctggcgaaggaacgcgaacc

SEQ ID NO: 6507 - RNA, 22 nt, synthetic construct
  source 1..22: mol_type = other RNA
accttggtcttgccttgcaggc

SEQ ID NO: 6508 - RNA, 22 nt, synthetic construct
  source 1..22: mol_type = other RNA
acgacctgcagcgcctcgtgcc

SEQ ID NO: 6509 - RNA, 22 nt, synthetic construct
  source 1..22: mol_type = other RNA
acgagcgccagcgtgcccgagc

SEQ ID NO: 6510 - RNA, 22 nt, synthetic construct
  source 1..22: mol_type = other RNA
acgagctgcttcggctgcacgc

SEQ ID NO: 6511 - RNA, 22 nt, synthetic construct
  source 1..22: mol_type = other RNA
acgaggcgctgcaggtcgtcgg

SEQ ID NO: 6512 - RNA, 22 nt, synthetic construct
  source 1..22: mol_type = other RNA
acgcatggtagagaagcgcgca

SEQ ID NO: 6513 - RNA, 22 nt, synthetic construct
  source 1..22: mol_type = other RNA
acgccagcgacacaagccaggg

SEQ ID NO: 6514 - RNA, 22 nt, synthetic construct
  source 1..22: mol_type = other RNA
acgcccagcccaatgcgcgcca

SEQ ID NO: 6515 - RNA, 22 nt, synthetic construct
  source 1..22: mol_type = other RNA
acgcctgcctcgcagtagcggt

SEQ ID NO: 6516 - RNA, 22 nt, synthetic construct
  source 1..22: mol_type = other RNA
acgcgaacccgtagagctggcg

SEQ ID NO: 6517 - RNA, 22 nt, synthetic construct
  source 1..22: mol_type = other RNA
acgcggtgctgtattggtgccg

SEQ ID NO: 6518 - RNA, 22 nt, synthetic construct
  source 1..22: mol_type = other RNA
acgctccgcgccagctctacgg

SEQ ID NO: 6519 - RNA, 22 nt, synthetic construct
  source 1..22: mol_type = other RNA
acgctggcgctcgtggagccgc

SEQ ID NO: 6520 - RNA, 22 nt, synthetic construct
  source 1..22: mol_type = other RNA
acggaccccgcgctgctgcgcc

SEQ ID NO: 6521 - RNA, 22 nt, synthetic construct
  source 1..22: mol_type = other RNA
acggcacgaggcgctgcaggtc

SEQ ID NO: 6522 - RNA, 22 nt, synthetic construct
  source 1..22: mol_type = other RNA
acgggggccaggcggtgcagcg

SEQ ID NO: 6523 - RNA, 22 nt, synthetic construct
  source 1..22: mol_type = other RNA
acgggttcgcgttccttcgcca

SEQ ID NO: 6524 - RNA, 22 nt, synthetic construct
  source 1..22: mol_type = other RNA
actaacaaggaggtggagcgcg

SEQ ID NO: 6525 - RNA, 22 nt, synthetic construct
  source 1..22: mol_type = other RNA
actcggctgcgcgcttctctac

SEQ ID NO: 6526 - RNA, 22 nt, synthetic construct
  source 1..22: mol_type = other RNA
actctaaccgcttggaggcgca

SEQ ID NO: 6527 - RNA, 22 nt, synthetic construct
  source 1..22: mol_type = other RNA
actgcgaggcaggcgtgcagcc

SEQ ID NO: 6528 - RNA, 22 nt, synthetic construct
  source 1..22: mol_type = other RNA
actgcgcctccaagcggttaga

SEQ ID NO: 6529 - RNA, 22 nt, synthetic construct
  source 1..22: mol_type = other RNA
actgcgcgctgcacgggggcca

SEQ ID NO: 6530 - RNA, 22 nt, synthetic construct
  source 1..22: mol_type = other RNA
actgcgcgctggcgctgggcaa

SEQ ID NO: 6531 - RNA, 22 nt, synthetic construct
  source 1..22: mol_type = other RNA
agaaagccccgatgcactgcgc

SEQ ID NO: 6532 - RNA, 22 nt, synthetic construct
  source 1..22: mol_type = other RNA
agaagcgcgcagccgagtggct

SEQ ID NO: 6533 - RNA, 22 nt, synthetic construct
  source 1..22: mol_type = other RNA
agaaggcgagcgggaagagcca

SEQ ID NO: 6534 - RNA, 22 nt, synthetic construct
  source 1..22: mol_type = other RNA
agacagcgggcgaagcggccag

SEQ ID NO: 6535 - RNA, 22 nt, synthetic construct
  source 1..22: mol_type = other RNA
agacatgccagaggctggtggc

SEQ ID NO: 6536 - RNA, 22 nt, synthetic construct
  source 1..22: mol_type = other RNA
agaccaaggtgggtgcagatgt

SEQ ID NO: 6537 - RNA, 22 nt, synthetic construct
  source 1..22: mol_type = other RNA
agaccgcgtggcgcgcattggg

SEQ ID NO: 6538 - RNA, 22 nt, synthetic construct
  source 1..22: mol_type = other RNA
agagaagcgcgcagccgagtgg

SEQ ID NO: 6539 - RNA, 22 nt, synthetic construct
  source 1..22: mol_type = other RNA
agagccactcggctgcgcgctt

SEQ ID NO: 6540 - RNA, 22 nt, synthetic construct
  source 1..22: mol_type = other RNA
agagcctgcaaggcaagaccaa

SEQ ID NO: 6541 - RNA, 22 nt, synthetic construct
  source 1..22: mol_type = other RNA
agagctggcgcggagcgtggca

SEQ ID NO: 6542 - RNA, 22 nt, synthetic construct
  source 1..22: mol_type = other RNA
agaggctggtggcggccggcgg

SEQ ID NO: 6543 - RNA, 22 nt, synthetic construct
  source 1..22: mol_type = other RNA
agaggtagaaagccccgatgca

SEQ ID NO: 6544 - RNA, 22 nt, synthetic construct
  source 1..22: mol_type = other RNA
agagtcgagcaacggcacgagg

SEQ ID NO: 6545 - RNA, 22 nt, synthetic construct
  source 1..22: mol_type = other RNA
agatgcctgccacgctccgcgc

SEQ ID NO: 6546 - RNA, 22 nt, synthetic construct
  source 1..22: mol_type = other RNA
agcaacggcacgaggcgctgca

SEQ ID NO: 6547 - RNA, 22 nt, synthetic construct
  source 1..22: mol_type = other RNA
agcacatgttcaagcattcgga

SEQ ID NO: 6548 - RNA, 22 nt, synthetic construct
  source 1..22: mol_type = other RNA
agcaccgcgtccaggccgccgg

SEQ ID NO: 6549 - RNA, 22 nt, synthetic construct
  source 1..22: mol_type = other RNA
agcagcgcggggtccgtgcggc

SEQ ID NO: 6550 - RNA, 22 nt, synthetic construct
  source 1..22: mol_type = other RNA
agcagctcgtcctccttggaga

SEQ ID NO: 6551 - RNA, 22 nt, synthetic construct
  source 1..22: mol_type = other RNA
agcattcggaggagacatgcca

SEQ ID NO: 6552 - RNA, 22 nt, synthetic construct
  source 1..22: mol_type = other RNA
agccactcggctgcgcgcttct

SEQ ID NO: 6553 - RNA, 22 nt, synthetic construct
  source 1..22: mol_type = other RNA
agccagggccgcgggcccgacg

SEQ ID NO: 6554 - RNA, 22 nt, synthetic construct
  source 1..22: mol_type = other RNA
agccccgatgcactgcgcctcc

SEQ ID NO: 6555 - RNA, 22 nt, synthetic construct
  source 1..22: mol_type = other RNA
agccgaagcagctcgtcctcct

SEQ ID NO: 6556 - RNA, 22 nt, synthetic construct
  source 1..22: mol_type = other RNA
agccgagtggctcttcccgctc

SEQ ID NO: 6557 - RNA, 22 nt, synthetic construct
  source 1..22: mol_type = other RNA
agccgcttgtggcctcgctgga

SEQ ID NO: 6558 - RNA, 22 nt, synthetic construct
  source 1..22: mol_type = other RNA
agcctcggcgcagaggtagaaa

SEQ ID NO: 6559 - RNA, 22 nt, synthetic construct
  source 1..22: mol_type = other RNA
agcctctggcatgtctcctccg

SEQ ID NO: 6560 - RNA, 22 nt, synthetic construct
  source 1..22: mol_type = other RNA
agcctgcaaggcaagaccaagg

SEQ ID NO: 6561 - RNA, 22 nt, synthetic construct
  source 1..22: mol_type = other RNA
agcgacacaagccagggccgcg

SEQ ID NO: 6562 - RNA, 22 nt, synthetic construct
  source 1..22: mol_type = other RNA
agcgacgcatggtagagaagcg

SEQ ID NO: 6563 - RNA, 22 nt, synthetic construct
  source 1..22: mol_type = other RNA
agcgaggccacaagcggctcca

SEQ ID NO: 6564 - RNA, 22 nt, synthetic construct
  source 1..22: mol_type = other RNA
agcgccagcgcgcagtggcgca

SEQ ID NO: 6565 - RNA, 22 nt, synthetic construct
  source 1..22: mol_type = other RNA
agcgccagcgtgcccgagcgct

SEQ ID NO: 6566 - RNA, 22 nt, synthetic construct
  source 1..22: mol_type = other RNA
agcgcctcgtgccgttgctcga

SEQ ID NO: 6567 - RNA, 22 nt, synthetic construct
  source 1..22: mol_type = other RNA
agcgcgaggtggagcgctcggg

SEQ ID NO: 6568 - RNA, 22 nt, synthetic construct
  source 1..22: mol_type = other RNA
agcgcgcagccgagtggctctt

SEQ ID NO: 6569 - RNA, 22 nt, synthetic construct
  source 1..22: mol_type = other RNA
agcgcgcagtggcgcagcagcg

SEQ ID NO: 6570 - RNA, 22 nt, synthetic construct
  source 1..22: mol_type = other RNA
agcgcgcagttgcccagcgcca

SEQ ID NO: 6571 - RNA, 22 nt, synthetic construct
  source 1..22: mol_type = other RNA
agcgcggggtccgtgcggcggc

SEQ ID NO: 6572 - RNA, 22 nt, synthetic construct
  source 1..22: mol_type = other RNA
agcgctccacctcgcgctccac

SEQ ID NO: 6573 - RNA, 22 nt, synthetic construct
  source 1..22: mol_type = other RNA
agcgctcgggcacgctggcgct

SEQ ID NO: 6574 - RNA, 22 nt, synthetic construct
  source 1..22: mol_type = other RNA
agcggccagggtccagcgaggc

SEQ ID NO: 6575 - RNA, 22 nt, synthetic construct
  source 1..22: mol_type = other RNA
agcggctccacgagcgccagcg

SEQ ID NO: 6576 - RNA, 22 nt, synthetic construct
  source 1..22: mol_type = other RNA
agcgggaagagccactcggctg

SEQ ID NO: 6577 - RNA, 22 nt, synthetic construct
  source 1..22: mol_type = other RNA
agcgggcgaagcggccagggtc

SEQ ID NO: 6578 - RNA, 22 nt, synthetic construct
  source 1..22: mol_type = other RNA
agcggtgttggcgactaacaag

SEQ ID NO: 6579 - RNA, 22 nt, synthetic construct
  source 1..22: mol_type = other RNA
agcggttagagtcgagcaacgg

SEQ ID NO: 6580 - RNA, 22 nt, synthetic construct
  source 1..22: mol_type = other RNA
agcgtgcccgagcgctccacct

SEQ ID NO: 6581 - RNA, 22 nt, synthetic construct
  source 1..22: mol_type = other RNA
agcgtggcaggcatcttggagc

SEQ ID NO: 6582 - RNA, 22 nt, synthetic construct
  source 1..22: mol_type = other RNA
agctcgtcctccttggagaagg

SEQ ID NO: 6583 - RNA, 22 nt, synthetic construct
  source 1..22: mol_type = other RNA
agctctacgggttcgcgttcct

SEQ ID NO: 6584 - RNA, 22 nt, synthetic construct
  source 1..22: mol_type = other RNA
agctgcttcggctgcacgcctg

SEQ ID NO: 6585 - RNA, 22 nt, synthetic construct
  source 1..22: mol_type = other RNA
agctggcgcggagcgtggcagg

SEQ ID NO: 6586 - RNA, 22 nt, synthetic construct
  source 1..22: mol_type = other RNA
aggaacgcgaacccgtagagct

SEQ ID NO: 6587 - RNA, 22 nt, synthetic construct
  source 1..22: mol_type = other RNA
aggacgagctgcttcggctgca

SEQ ID NO: 6588 - RNA, 22 nt, synthetic construct
  source 1..22: mol_type = other RNA
aggagacatgccagaggctggt

SEQ ID NO: 6589 - RNA, 22 nt, synthetic construct
  source 1..22: mol_type = other RNA
aggaggacgagctgcttcggct

SEQ ID NO: 6590 - RNA, 22 nt, synthetic construct
  source 1..22: mol_type = other RNA
aggaggtggagcgcgaggtgga

SEQ ID NO: 6591 - RNA, 22 nt, synthetic construct
  source 1..22: mol_type = other RNA
aggatcacgcccagcccaatgc

SEQ ID NO: 6592 - RNA, 22 nt, synthetic construct
  source 1..22: mol_type = other RNA
aggcaagaccaaggtgggtgca

SEQ ID NO: 6593 - RNA, 22 nt, synthetic construct
  source 1..22: mol_type = other RNA
aggcaggcgtgcagccgaagca

SEQ ID NO: 6594 - RNA, 22 nt, synthetic construct
  source 1..22: mol_type = other RNA
aggcatcttggagcacatgttc

SEQ ID NO: 6595 - RNA, 22 nt, synthetic construct
  source 1..22: mol_type = other RNA
aggccacaagcggctccacgag

SEQ ID NO: 6596 - RNA, 22 nt, synthetic construct
  source 1..22: mol_type = other RNA
aggccgccggccgccaccagcc

SEQ ID NO: 6597 - RNA, 22 nt, synthetic construct
  source 1..22: mol_type = other RNA
aggcgagcgggaagagccactc

SEQ ID NO: 6598 - RNA, 22 nt, synthetic construct
  source 1..22: mol_type = other RNA
aggcgcagtgcatcggggcttt

SEQ ID NO: 6599 - RNA, 22 nt, synthetic construct
  source 1..22: mol_type = other RNA
aggcgctgcaggtcgtcgggcc

SEQ ID NO: 6600 - RNA, 22 nt, synthetic construct
  source 1..22: mol_type = other RNA
aggcggtgcagcgacgcatggt

SEQ ID NO: 6601 - RNA, 22 nt, synthetic construct
  source 1..22: mol_type = other RNA
aggcgtgcagccgaagcagctc

SEQ ID NO: 6602 - RNA, 22 nt, synthetic construct
  source 1..22: mol_type = other RNA
aggctcttgatggcagcctcgg

SEQ ID NO: 6603 - RNA, 22 nt, synthetic construct
  source 1..22: mol_type = other RNA
aggctgccatcaagagcctgca

SEQ ID NO: 6604 - RNA, 22 nt, synthetic construct
  source 1..22: mol_type = other RNA
aggctggtggcggccggcggcc

SEQ ID NO: 6605 - RNA, 22 nt, synthetic construct
  source 1..22: mol_type = other RNA
agggccgcgggcccgacgacct

SEQ ID NO: 6606 - RNA, 22 nt, synthetic construct
  source 1..22: mol_type = other RNA
agggtccagcgaggccacaagc

SEQ ID NO: 6607 - RNA, 22 nt, synthetic construct
  source 1..22: mol_type = other RNA
aggtagaaagccccgatgcact

SEQ ID NO: 6608 - RNA, 22 nt, synthetic construct
  source 1..22: mol_type = other RNA
aggtcgtcgggcccgcggccct

SEQ ID NO: 6609 - RNA, 22 nt, synthetic construct
  source 1..22: mol_type = other RNA
aggtggagcgcgaggtggagcg

SEQ ID NO: 6610 - RNA, 22 nt, synthetic construct
  source 1..22: mol_type = other RNA
aggtggagcgctcgggcacgct

SEQ ID NO: 6611 - RNA, 22 nt, synthetic construct
  source 1..22: mol_type = other RNA
aggtgggtgcagatgtggggtt

SEQ ID NO: 6612 - RNA, 22 nt, synthetic construct
  source 1..22: mol_type = other RNA
aggttcaggatcacgcccagcc

SEQ ID NO: 6613 - RNA, 22 nt, synthetic construct
  source 1..22: mol_type = other RNA
agtagcggtgttggcgactaac

SEQ ID NO: 6614 - RNA, 22 nt, synthetic construct
  source 1..22: mol_type = other RNA
agtcgagcaacggcacgaggcg

SEQ ID NO: 6615 - RNA, 22 nt, synthetic construct
  source 1..22: mol_type = other RNA
agtcgccaacaccgctactgcg

SEQ ID NO: 6616 - RNA, 22 nt, synthetic construct
  source 1..22: mol_type = other RNA
agtgcatcggggctttctacct

SEQ ID NO: 6617 - RNA, 22 nt, synthetic construct
  source 1..22: mol_type = other RNA
agtggcgcagcagcgcggggtc

SEQ ID NO: 6618 - RNA, 22 nt, synthetic construct
  source 1..22: mol_type = other RNA
agtggctcttcccgctcgcctt

SEQ ID NO: 6619 - RNA, 22 nt, synthetic construct
  source 1..22: mol_type = other RNA
agttgcccagcgccagcgcgca

SEQ ID NO: 6620 - RNA, 22 nt, synthetic construct
  source 1..22: mol_type = other RNA
atacagcaccgcgtccaggccg

SEQ ID NO: 6621 - RNA, 22 nt, synthetic construct
  source 1..22: mol_type = other RNA
atcaagagcctgcaaggcaaga

SEQ ID NO: 6622 - RNA, 22 nt, synthetic construct
  source 1..22: mol_type = other RNA
atcacgcccagcccaatgcgcg

SEQ ID NO: 6623 - RNA, 22 nt, synthetic construct
  source 1..22: mol_type = other RNA
atccacccaaccccacatctgc

SEQ ID NO: 6624 - RNA, 22 nt, synthetic construct
  source 1..22: mol_type = other RNA
atcctgaacctggcgaaggaac

SEQ ID NO: 6625 - RNA, 22 nt, synthetic construct
  source 1..22: mol_type = other RNA
atcggggctttctacctctgcg

SEQ ID NO: 6626 - RNA, 22 nt, synthetic construct
  source 1..22: mol_type = other RNA
atctgcacccaccttggtcttg

SEQ ID NO: 6627 - RNA, 22 nt, synthetic construct
  source 1..22: mol_type = other RNA
atcttggagcacatgttcaagc

SEQ ID NO: 6628 - RNA, 22 nt, synthetic construct
  source 1..22: mol_type = other RNA
atgcactgcgcctccaagcggt

SEQ ID NO: 6629 - RNA, 22 nt, synthetic construct
  source 1..22: mol_type = other RNA
atgccagaggctggtggcggcc

SEQ ID NO: 6630 - RNA, 22 nt, synthetic construct
  source 1..22: mol_type = other RNA
atgcctgccacgctccgcgcca

SEQ ID NO: 6631 - RNA, 22 nt, synthetic construct
  source 1..22: mol_type = other RNA
atgcgtcgctgcaccgcctggc

SEQ ID NO: 6632 - RNA, 22 nt, synthetic construct
  source 1..22: mol_type = other RNA
atgcttgaacatgtgctccaag

SEQ ID NO: 6633 - RNA, 22 nt, synthetic construct
  source 1..22: mol_type = other RNA
atggcagcctcggcgcagaggt

SEQ ID NO: 6634 - RNA, 22 nt, synthetic construct
  source 1..22: mol_type = other RNA
atggtagagaagcgcgcagccg

SEQ ID NO: 6635 - RNA, 22 nt, synthetic construct
  source 1..22: mol_type = other RNA
atgtctcctccgaatgcttgaa

SEQ ID NO: 6636 - RNA, 22 nt, synthetic construct
  source 1..22: mol_type = other RNA
atgtgctccaagatgcctgcca

SEQ ID NO: 6637 - RNA, 22 nt, synthetic construct
  source 1..22: mol_type = other RNA
atgttcaagcattcggaggaga

SEQ ID NO: 6638 - RNA, 22 nt, synthetic construct
  source 1..22: mol_type = other RNA
attcggaggagacatgccagag

SEQ ID NO: 6639 - RNA, 22 nt, synthetic construct
  source 1..22: mol_type = other RNA
attgggctgggcgtgatcctga

SEQ ID NO: 6640 - RNA, 22 nt, synthetic construct
  source 1..22: mol_type = other RNA
attggtgccgccgcacggaccc

SEQ ID NO: 6641 - RNA, 22 nt, synthetic construct
  source 1..22: mol_type = other RNA
caacaccgctactgcgaggcag

SEQ ID NO: 6642 - RNA, 22 nt, synthetic construct
  source 1..22: mol_type = other RNA
caaccccacatctgcacccacc

SEQ ID NO: 6643 - RNA, 22 nt, synthetic construct
  source 1..22: mol_type = other RNA
caacggcacgaggcgctgcagg

SEQ ID NO: 6644 - RNA, 22 nt, synthetic construct
  source 1..22: mol_type = other RNA
caactgcgcgctgcacgggggc

SEQ ID NO: 6645 - RNA, 22 nt, synthetic construct
  source 1..22: mol_type = other RNA
caagaccaaggtgggtgcagat

SEQ ID NO: 6646 - RNA, 22 nt, synthetic construct
  source 1..22: mol_type = other RNA
caagagcctgcaaggcaagacc

SEQ ID NO: 6647 - RNA, 22 nt, synthetic construct
  source 1..22: mol_type = other RNA
caagatgcctgccacgctccgc

SEQ ID NO: 6648 - RNA, 22 nt, synthetic construct
  source 1..22: mol_type = other RNA
caagcattcggaggagacatgc

SEQ ID NO: 6649 - RNA, 22 nt, synthetic construct
  source 1..22: mol_type = other RNA
caagccagggccgcgggcccga

SEQ ID NO: 6650 - RNA, 22 nt, synthetic construct
  source 1..22: mol_type = other RNA
caagcggctccacgagcgccag

SEQ ID NO: 6651 - RNA, 22 nt, synthetic construct
  source 1..22: mol_type = other RNA
caagcggttagagtcgagcaac

SEQ ID NO: 6652 - RNA, 22 nt, synthetic construct
  source 1..22: mol_type = other RNA
caaggaggacgagctgcttcgg

SEQ ID NO: 6653 - RNA, 22 nt, synthetic construct
  source 1..22: mol_type = other RNA
caaggaggtggagcgcgaggtg

SEQ ID NO: 6654 - RNA, 22 nt, synthetic construct
  source 1..22: mol_type = other RNA
caaggcaagaccaaggtgggtg

SEQ ID NO: 6655 - RNA, 22 nt, synthetic construct
  source 1..22: mol_type = other RNA
caaggtgggtgcagatgtgggg

SEQ ID NO: 6656 - RNA, 22 nt, synthetic construct
  source 1..22: mol_type = other RNA
caatacagcaccgcgtccaggc

SEQ ID NO: 6657 - RNA, 22 nt, synthetic construct
  source 1..22: mol_type = other RNA
cacaagccagggccgcgggccc

SEQ ID NO: 6658 - RNA, 22 nt, synthetic construct
  source 1..22: mol_type = other RNA
cacaagcggctccacgagcgcc

SEQ ID NO: 6659 - RNA, 22 nt, synthetic construct
  source 1..22: mol_type = other RNA
cacatctgcacccaccttggtc

SEQ ID NO: 6660 - RNA, 22 nt, synthetic construct
  source 1..22: mol_type = other RNA
cacatgttcaagcattcggagg

SEQ ID NO: 6661 - RNA, 22 nt, synthetic construct
  source 1..22: mol_type = other RNA
caccaatacagcaccgcgtcca

SEQ ID NO: 6662 - RNA, 22 nt, synthetic construct
  source 1..22: mol_type = other RNA
caccagacagcgggcgaagcgg

SEQ ID NO: 6663 - RNA, 22 nt, synthetic construct
  source 1..22: mol_type = other RNA
caccagcctctggcatgtctcc

SEQ ID NO: 6664 - RNA, 22 nt, synthetic construct
  source 1..22: mol_type = other RNA
cacccaaccccacatctgcacc

SEQ ID NO: 6665 - RNA, 22 nt, synthetic construct
  source 1..22: mol_type = other RNA
cacccaccttggtcttgccttg

SEQ ID NO: 6666 - RNA, 22 nt, synthetic construct
  source 1..22: mol_type = other RNA
caccgcctggcccccgtgcagc

SEQ ID NO: 6667 - RNA, 22 nt, synthetic construct
  source 1..22: mol_type = other RNA
caccgcgtccaggccgccggcc

SEQ ID NO: 6668 - RNA, 22 nt, synthetic construct
  source 1..22: mol_type = other RNA
caccgctactgcgaggcaggcg

SEQ ID NO: 6669 - RNA, 22 nt, synthetic construct
  source 1..22: mol_type = other RNA
cacctccttgttagtcgccaac

SEQ ID NO: 6670 - RNA, 22 nt, synthetic construct
  source 1..22: mol_type = other RNA
cacctcgcgctccacctccttg

SEQ ID NO: 6671 - RNA, 22 nt, synthetic construct
  source 1..22: mol_type = other RNA
caccttggtcttgccttgcagg

SEQ ID NO: 6672 - RNA, 22 nt, synthetic construct
  source 1..22: mol_type = other RNA
cacgagcgccagcgtgcccgag

SEQ ID NO: 6673 - RNA, 22 nt, synthetic construct
  source 1..22: mol_type = other RNA
cacgaggcgctgcaggtcgtcg

SEQ ID NO: 6674 - RNA, 22 nt, synthetic construct
  source 1..22: mol_type = other RNA
cacgcccagcccaatgcgcgcc

SEQ ID NO: 6675 - RNA, 22 nt, synthetic construct
  source 1..22: mol_type = other RNA
cacgcctgcctcgcagtagcgg

SEQ ID NO: 6676 - RNA, 22 nt, synthetic construct
  source 1..22: mol_type = other RNA
cacgctccgcgccagctctacg

SEQ ID NO: 6677 - RNA, 22 nt, synthetic construct
  source 1..22: mol_type = other RNA
cacgctggcgctcgtggagccg

SEQ ID NO: 6678 - RNA, 22 nt, synthetic construct
  source 1..22: mol_type = other RNA
cacggaccccgcgctgctgcgc

SEQ ID NO: 6679 - RNA, 22 nt, synthetic construct
  source 1..22: mol_type = other RNA
cacgggggccaggcggtgcagc

SEQ ID NO: 6680 - RNA, 22 nt, synthetic construct
  source 1..22: mol_type = other RNA
cactcggctgcgcgcttctcta

SEQ ID NO: 6681 - RNA, 22 nt, synthetic construct
  source 1..22: mol_type = other RNA
cactgcgcctccaagcggttag

SEQ ID NO: 6682 - RNA, 22 nt, synthetic construct
  source 1..22: mol_type = other RNA
cactgcgcgctggcgctgggca

SEQ ID NO: 6683 - RNA, 22 nt, synthetic construct
  source 1..22: mol_type = other RNA
cagacagcgggcgaagcggcca

SEQ ID NO: 6684 - RNA, 22 nt, synthetic construct
  source 1..22: mol_type = other RNA
cagaggctggtggcggccggcg

SEQ ID NO: 6685 - RNA, 22 nt, synthetic construct
  source 1..22: mol_type = other RNA
cagaggtagaaagccccgatgc

SEQ ID NO: 6686 - RNA, 22 nt, synthetic construct
  source 1..22: mol_type = other RNA
cagcaccgcgtccaggccgccg

SEQ ID NO: 6687 - RNA, 22 nt, synthetic construct
  source 1..22: mol_type = other RNA
cagcagcgcggggtccgtgcgg

SEQ ID NO: 6688 - RNA, 22 nt, synthetic construct
  source 1..22: mol_type = other RNA
cagccgaagcagctcgtcctcc

SEQ ID NO: 6689 - RNA, 22 nt, synthetic construct
  source 1..22: mol_type = other RNA
cagccgagtggctcttcccgct

SEQ ID NO: 6690 - RNA, 22 nt, synthetic construct
  source 1..22: mol_type = other RNA
cagcctcggcgcagaggtagaa

SEQ ID NO: 6691 - RNA, 22 nt, synthetic construct
  source 1..22: mol_type = other RNA
cagcctctggcatgtctcctcc

SEQ ID NO: 6692 - RNA, 22 nt, synthetic construct
  source 1..22: mol_type = other RNA
cagcgacacaagccagggccgc

SEQ ID NO: 6693 - RNA, 22 nt, synthetic construct
  source 1..22: mol_type = other RNA
cagcgacgcatggtagagaagc

SEQ ID NO: 6694 - RNA, 22 nt, synthetic construct
  source 1..22: mol_type = other RNA
cagcgaggccacaagcggctcc

SEQ ID NO: 6695 - RNA, 22 nt, synthetic construct
  source 1..22: mol_type = other RNA
cagcgccagcgcgcagtggcgc

SEQ ID NO: 6696 - RNA, 22 nt, synthetic construct
  source 1..22: mol_type = other RNA
cagcgcctcgtgccgttgctcg

SEQ ID NO: 6697 - RNA, 22 nt, synthetic construct
  source 1..22: mol_type = other RNA
cagcgcgcagtggcgcagcagc

SEQ ID NO: 6698 - RNA, 22 nt, synthetic construct
  source 1..22: mol_type = other RNA
cagcgcgcagttgcccagcgcc

SEQ ID NO: 6699 - RNA, 22 nt, synthetic construct
  source 1..22: mol_type = other RNA
cagcgcggggtccgtgcggcgg

SEQ ID NO: 6700 - RNA, 22 nt, synthetic construct
  source 1..22: mol_type = other RNA
cagcgggcgaagcggccagggt

SEQ ID NO: 6701 - RNA, 22 nt, synthetic construct
  source 1..22: mol_type = other RNA
cagcgtgcccgagcgctccacc

SEQ ID NO: 6702 - RNA, 22 nt, synthetic construct
  source 1..22: mol_type = other RNA
cagctcgtcctccttggagaag

SEQ ID NO: 6703 - RNA, 22 nt, synthetic construct
  source 1..22: mol_type = other RNA
cagctctacgggttcgcgttcc

SEQ ID NO: 6704 - RNA, 22 nt, synthetic construct
  source 1..22: mol_type = other RNA
caggatcacgcccagcccaatg

SEQ ID NO: 6705 - RNA, 22 nt, synthetic construct
  source 1..22: mol_type = other RNA
caggcatcttggagcacatgtt

SEQ ID NO: 6706 - RNA, 22 nt, synthetic construct
  source 1..22: mol_type = other RNA
caggccgccggccgccaccagc

SEQ ID NO: 6707 - RNA, 22 nt, synthetic construct
  source 1..22: mol_type = other RNA
caggcggtgcagcgacgcatgg

SEQ ID NO: 6708 - RNA, 22 nt, synthetic construct
  source 1..22: mol_type = other RNA
caggcgtgcagccgaagcagct

SEQ ID NO: 6709 - RNA, 22 nt, synthetic construct
  source 1..22: mol_type = other RNA
caggctcttgatggcagcctcg

SEQ ID NO: 6710 - RNA, 22 nt, synthetic construct
  source 1..22: mol_type = other RNA
cagggccgcgggcccgacgacc

SEQ ID NO: 6711 - RNA, 22 nt, synthetic construct
  source 1..22: mol_type = other RNA
cagggtccagcgaggccacaag

SEQ ID NO: 6712 - RNA, 22 nt, synthetic construct
  source 1..22: mol_type = other RNA
caggtcgtcgggcccgcggccc

SEQ ID NO: 6713 - RNA, 22 nt, synthetic construct
  source 1..22: mol_type = other RNA
caggttcaggatcacgcccagc

SEQ ID NO: 6714 - RNA, 22 nt, synthetic construct
  source 1..22: mol_type = other RNA
cagtagcggtgttggcgactaa

SEQ ID NO: 6715 - RNA, 22 nt, synthetic construct
  source 1..22: mol_type = other RNA
cagtgcatcggggctttctacc

SEQ ID NO: 6716 - RNA, 22 nt, synthetic construct
  source 1..22: mol_type = other RNA
cagtggcgcagcagcgcggggt

SEQ ID NO: 6717 - RNA, 22 nt, synthetic construct
  source 1..22: mol_type = other RNA
cagttgcccagcgccagcgcgc

SEQ ID NO: 6718 - RNA, 22 nt, synthetic construct
  source 1..22: mol_type = other RNA
catcaagagcctgcaaggcaag

SEQ ID NO: 6719 - RNA, 22 nt, synthetic construct
  source 1..22: mol_type = other RNA
catcggggctttctacctctgc

SEQ ID NO: 6720 - RNA, 22 nt, synthetic construct
  source 1..22: mol_type = other RNA
catctgcacccaccttggtctt

SEQ ID NO: 6721 - RNA, 22 nt, synthetic construct
  source 1..22: mol_type = other RNA
catcttggagcacatgttcaag

SEQ ID NO: 6722 - RNA, 22 nt, synthetic construct
  source 1..22: mol_type = other RNA
catgccagaggctggtggcggc

SEQ ID NO: 6723 - RNA, 22 nt, synthetic construct
  source 1..22: mol_type = other RNA
catgcgtcgctgcaccgcctgg

SEQ ID NO: 6724 - RNA, 22 nt, synthetic construct
  source 1..22: mol_type = other RNA
catggtagagaagcgcgcagcc

SEQ ID NO: 6725 - RNA, 22 nt, synthetic construct
  source 1..22: mol_type = other RNA
catgtctcctccgaatgcttga

SEQ ID NO: 6726 - RNA, 22 nt, synthetic construct
  source 1..22: mol_type = other RNA
catgtgctccaagatgcctgcc

SEQ ID NO: 6727 - RNA, 22 nt, synthetic construct
  source 1..22: mol_type = other RNA
catgttcaagcattcggaggag

SEQ ID NO: 6728 - RNA, 22 nt, synthetic construct
  source 1..22: mol_type = other RNA
cattcggaggagacatgccaga

SEQ ID NO: 6729 - RNA, 22 nt, synthetic construct
  source 1..22: mol_type = other RNA
cattgggctgggcgtgatcctg

SEQ ID NO: 6730 - RNA, 22 nt, synthetic construct
  source 1..22: mol_type = other RNA
ccaacaccgctactgcgaggca

SEQ ID NO: 6731 - RNA, 22 nt, synthetic construct
  source 1..22: mol_type = other RNA
ccaaccccacatctgcacccac

SEQ ID NO: 6732 - RNA, 22 nt, synthetic construct
  source 1..22: mol_type = other RNA
ccaagatgcctgccacgctccg

SEQ ID NO: 6733 - RNA, 22 nt, synthetic construct
  source 1..22: mol_type = other RNA
ccaagcggttagagtcgagcaa

SEQ ID NO: 6734 - RNA, 22 nt, synthetic construct
  source 1..22: mol_type = other RNA
ccaaggaggacgagctgcttcg

SEQ ID NO: 6735 - RNA, 22 nt, synthetic construct
  source 1..22: mol_type = other RNA
ccaaggtgggtgcagatgtggg

SEQ ID NO: 6736 - RNA, 22 nt, synthetic construct
  source 1..22: mol_type = other RNA
ccaatacagcaccgcgtccagg

SEQ ID NO: 6737 - RNA, 22 nt, synthetic construct
  source 1..22: mol_type = other RNA
ccacaagcggctccacgagcgc

SEQ ID NO: 6738 - RNA, 22 nt, synthetic construct
  source 1..22: mol_type = other RNA
ccacatctgcacccaccttggt

SEQ ID NO: 6739 - RNA, 22 nt, synthetic construct
  source 1..22: mol_type = other RNA
ccaccagacagcgggcgaagcg

SEQ ID NO: 6740 - RNA, 22 nt, synthetic construct
  source 1..22: mol_type = other RNA
ccaccagcctctggcatgtctc

SEQ ID NO: 6741 - RNA, 22 nt, synthetic construct
  source 1..22: mol_type = other RNA
ccacccaaccccacatctgcac

SEQ ID NO: 6742 - RNA, 22 nt, synthetic construct
  source 1..22: mol_type = other RNA
ccacctccttgttagtcgccaa

SEQ ID NO: 6743 - RNA, 22 nt, synthetic construct
  source 1..22: mol_type = other RNA
ccacctcgcgctccacctcctt

SEQ ID NO: 6744 - RNA, 22 nt, synthetic construct
  source 1..22: mol_type = other RNA
ccaccttggtcttgccttgcag

SEQ ID NO: 6745 - RNA, 22 nt, synthetic construct
  source 1..22: mol_type = other RNA
ccacgagcgccagcgtgcccga

SEQ ID NO: 6746 - RNA, 22 nt, synthetic construct
  source 1..22: mol_type = other RNA
ccacgctccgcgccagctctac

SEQ ID NO: 6747 - RNA, 22 nt, synthetic construct
  source 1..22: mol_type = other RNA
ccactcggctgcgcgcttctct

SEQ ID NO: 6748 - RNA, 22 nt, synthetic construct
  source 1..22: mol_type = other RNA
ccactgcgcgctggcgctgggc

SEQ ID NO: 6749 - RNA, 22 nt, synthetic construct
  source 1..22: mol_type = other RNA
ccagacagcgggcgaagcggcc

SEQ ID NO: 6750 - RNA, 22 nt, synthetic construct
  source 1..22: mol_type = other RNA
ccagaggctggtggcggccggc

SEQ ID NO: 6751 - RNA, 22 nt, synthetic construct
  source 1..22: mol_type = other RNA
ccagcctctggcatgtctcctc

SEQ ID NO: 6752 - RNA, 22 nt, synthetic construct
  source 1..22: mol_type = other RNA
ccagcgacacaagccagggccg

SEQ ID NO: 6753 - RNA, 22 nt, synthetic construct
  source 1..22: mol_type = other RNA
ccagcgaggccacaagcggctc

SEQ ID NO: 6754 - RNA, 22 nt, synthetic construct
  source 1..22: mol_type = other RNA
ccagcgccagcgcgcagtggcg

SEQ ID NO: 6755 - RNA, 22 nt, synthetic construct
  source 1..22: mol_type = other RNA
ccagcgcgcagtggcgcagcag

SEQ ID NO: 6756 - RNA, 22 nt, synthetic construct
  source 1..22: mol_type = other RNA
ccagcgtgcccgagcgctccac

SEQ ID NO: 6757 - RNA, 22 nt, synthetic construct
  source 1..22: mol_type = other RNA
ccagctctacgggttcgcgttc

SEQ ID NO: 6758 - RNA, 22 nt, synthetic construct
  source 1..22: mol_type = other RNA
ccaggccgccggccgccaccag

SEQ ID NO: 6759 - RNA, 22 nt, synthetic construct
  source 1..22: mol_type = other RNA
ccaggcggtgcagcgacgcatg

SEQ ID NO: 6760 - RNA, 22 nt, synthetic construct
  source 1..22: mol_type = other RNA
ccagggccgcgggcccgacgac

SEQ ID NO: 6761 - RNA, 22 nt, synthetic construct
  source 1..22: mol_type = other RNA
ccagggtccagcgaggccacaa

SEQ ID NO: 6762 - RNA, 22 nt, synthetic construct
  source 1..22: mol_type = other RNA
ccaggttcaggatcacgcccag

SEQ ID NO: 6763 - RNA, 22 nt, synthetic construct
  source 1..22: mol_type = other RNA
ccatcaagagcctgcaaggcaa

SEQ ID NO: 6764 - RNA, 22 nt, synthetic construct
  source 1..22: mol_type = other RNA
ccatgcgtcgctgcaccgcctg

SEQ ID NO: 6765 - RNA, 22 nt, synthetic construct
  source 1..22: mol_type = other RNA
cccaaccccacatctgcaccca

SEQ ID NO: 6766 - RNA, 22 nt, synthetic construct
  source 1..22: mol_type = other RNA
cccacatctgcacccaccttgg

SEQ ID NO: 6767 - RNA, 22 nt, synthetic construct
  source 1..22: mol_type = other RNA
cccaccttggtcttgccttgca

SEQ ID NO: 6768 - RNA, 22 nt, synthetic construct
  source 1..22: mol_type = other RNA
cccagcgccagcgcgcagtggc

SEQ ID NO: 6769 - RNA, 22 nt, synthetic construct
  source 1..22: mol_type = other RNA
ccccacatctgcacccaccttg

SEQ ID NO: 6770 - RNA, 22 nt, synthetic construct
  source 1..22: mol_type = other RNA
cccccgtgcagcgcgcagttgc

SEQ ID NO: 6771 - RNA, 22 nt, synthetic construct
  source 1..22: mol_type = other RNA
ccccgatgcactgcgcctccaa

SEQ ID NO: 6772 - RNA, 22 nt, synthetic construct
  source 1..22: mol_type = other RNA
ccccgcgctgctgcgccactgc

SEQ ID NO: 6773 - RNA, 22 nt, synthetic construct
  source 1..22: mol_type = other RNA
ccccgtgcagcgcgcagttgcc

SEQ ID NO: 6774 - RNA, 22 nt, synthetic construct
  source 1..22: mol_type = other RNA
cccgacgacctgcagcgcctcg

SEQ ID NO: 6775 - RNA, 22 nt, synthetic construct
  source 1..22: mol_type = other RNA
cccgagcgctccacctcgcgct

SEQ ID NO: 6776 - RNA, 22 nt, synthetic construct
  source 1..22: mol_type = other RNA
cccgatgcactgcgcctccaag

SEQ ID NO: 6777 - RNA, 22 nt, synthetic construct
  source 1..22: mol_type = other RNA
cccgcgctgctgcgccactgcg

SEQ ID NO: 6778 - RNA, 22 nt, synthetic construct
  source 1..22: mol_type = other RNA
cccgcggccctggcttgtgtcg

SEQ ID NO: 6779 - RNA, 22 nt, synthetic construct
  source 1..22: mol_type = other RNA
cccgctcgccttctccaaggag

SEQ ID NO: 6780 - RNA, 22 nt, synthetic construct
  source 1..22: mol_type = other RNA
cccgctgtctggtggacgccag

SEQ ID NO: 6781 - RNA, 22 nt, synthetic construct
  source 1..22: mol_type = other RNA
cccgtagagctggcgcggagcg

SEQ ID NO: 6782 - RNA, 22 nt, synthetic construct
  source 1..22: mol_type = other RNA
cccgtgcagcgcgcagttgccc

SEQ ID NO: 6783 - RNA, 22 nt, synthetic construct
  source 1..22: mol_type = other RNA
ccctggccgcttcgcccgctgt

SEQ ID NO: 6784 - RNA, 22 nt, synthetic construct
  source 1..22: mol_type = other RNA
ccctggcttgtgtcgctggcgt

SEQ ID NO: 6785 - RNA, 22 nt, synthetic construct
  source 1..22: mol_type = other RNA
ccgaagcagctcgtcctccttg

SEQ ID NO: 6786 - RNA, 22 nt, synthetic construct
  source 1..22: mol_type = other RNA
ccgaatgcttgaacatgtgctc

SEQ ID NO: 6787 - RNA, 22 nt, synthetic construct
  source 1..22: mol_type = other RNA
ccgacgacctgcagcgcctcgt

SEQ ID NO: 6788 - RNA, 22 nt, synthetic construct
  source 1..22: mol_type = other RNA
ccgagcgctccacctcgcgctc

SEQ ID NO: 6789 - RNA, 22 nt, synthetic construct
  source 1..22: mol_type = other RNA
ccgaggctgccatcaagagcct

SEQ ID NO: 6790 - RNA, 22 nt, synthetic construct
  source 1..22: mol_type = other RNA
ccgagtggctcttcccgctcgc

SEQ ID NO: 6791 - RNA, 22 nt, synthetic construct
  source 1..22: mol_type = other RNA
ccgatgcactgcgcctccaagc

SEQ ID NO: 6792 - RNA, 22 nt, synthetic construct
  source 1..22: mol_type = other RNA
ccgcacggaccccgcgctgctg

SEQ ID NO: 6793 - RNA, 22 nt, synthetic construct
  source 1..22: mol_type = other RNA
ccgccaccagcctctggcatgt

SEQ ID NO: 6794 - RNA, 22 nt, synthetic construct
  source 1..22: mol_type = other RNA
ccgccgcacggaccccgcgctg

SEQ ID NO: 6795 - RNA, 22 nt, synthetic construct
  source 1..22: mol_type = other RNA
ccgccggccgccaccagcctct

SEQ ID NO: 6796 - RNA, 22 nt, synthetic construct
  source 1..22: mol_type = other RNA
ccgcctggcccccgtgcagcgc

SEQ ID NO: 6797 - RNA, 22 nt, synthetic construct
  source 1..22: mol_type = other RNA
ccgcgccagctctacgggttcg

SEQ ID NO: 6798 - RNA, 22 nt, synthetic construct
  source 1..22: mol_type = other RNA
ccgcgctgctgcgccactgcgc

SEQ ID NO: 6799 - RNA, 22 nt, synthetic construct
  source 1..22: mol_type = other RNA
ccgcggccctggcttgtgtcgc

SEQ ID NO: 6800 - RNA, 22 nt, synthetic construct
  source 1..22: mol_type = other RNA
ccgcgggcccgacgacctgcag

SEQ ID NO: 6801 - RNA, 22 nt, synthetic construct
  source 1..22: mol_type = other RNA
ccgcgtccaggccgccggccgc

SEQ ID NO: 6802 - RNA, 22 nt, synthetic construct
  source 1..22: mol_type = other RNA
ccgcgtggcgcgcattgggctg

SEQ ID NO: 6803 - RNA, 22 nt, synthetic construct
  source 1..22: mol_type = other RNA
ccgctactgcgaggcaggcgtg

SEQ ID NO: 6804 - RNA, 22 nt, synthetic construct
  source 1..22: mol_type = other RNA
ccgctcgccttctccaaggagg

SEQ ID NO: 6805 - RNA, 22 nt, synthetic construct
  source 1..22: mol_type = other RNA
ccgctgtctggtggacgccagc

SEQ ID NO: 6806 - RNA, 22 nt, synthetic construct
  source 1..22: mol_type = other RNA
ccgcttcgcccgctgtctggtg

SEQ ID NO: 6807 - RNA, 22 nt, synthetic construct
  source 1..22: mol_type = other RNA
ccgcttggaggcgcagtgcatc

SEQ ID NO: 6808 - RNA, 22 nt, synthetic construct
  source 1..22: mol_type = other RNA
ccgcttgtggcctcgctggacc

SEQ ID NO: 6809 - RNA, 22 nt, synthetic construct
  source 1..22: mol_type = other RNA
ccggccgccaccagcctctggc

SEQ ID NO: 6810 - RNA, 22 nt, synthetic construct
  source 1..22: mol_type = other RNA
ccggcggcctggacgcggtgct

SEQ ID NO: 6811 - RNA, 22 nt, synthetic construct
  source 1..22: mol_type = other RNA
ccgtagagctggcgcggagcgt

SEQ ID NO: 6812 - RNA, 22 nt, synthetic construct
  source 1..22: mol_type = other RNA
ccgtgcagcgcgcagttgccca

SEQ ID NO: 6813 - RNA, 22 nt, synthetic construct
  source 1..22: mol_type = other RNA
ccgtgcggcggcaccaatacag

SEQ ID NO: 6814 - RNA, 22 nt, synthetic construct
  source 1..22: mol_type = other RNA
ccgttgctcgactctaaccgct

SEQ ID NO: 6815 - RNA, 22 nt, synthetic construct
  source 1..22: mol_type = other RNA
cctccaagcggttagagtcgag

SEQ ID NO: 6816 - RNA, 22 nt, synthetic construct
  source 1..22: mol_type = other RNA
cctccgaatgcttgaacatgtg

SEQ ID NO: 6817 - RNA, 22 nt, synthetic construct
  source 1..22: mol_type = other RNA
cctccttggagaaggcgagcgg

SEQ ID NO: 6818 - RNA, 22 nt, synthetic construct
  source 1..22: mol_type = other RNA
cctccttgttagtcgccaacac

SEQ ID NO: 6819 - RNA, 22 nt, synthetic construct
  source 1..22: mol_type = other RNA
cctcgcagtagcggtgttggcg

SEQ ID NO: 6820 - RNA, 22 nt, synthetic construct
  source 1..22: mol_type = other RNA
cctcgcgctccacctccttgtt

SEQ ID NO: 6821 - RNA, 22 nt, synthetic construct
  source 1..22: mol_type = other RNA
cctcgctggaccctggccgctt

SEQ ID NO: 6822 - RNA, 22 nt, synthetic construct
  source 1..22: mol_type = other RNA
cctcggcgcagaggtagaaagc

SEQ ID NO: 6823 - RNA, 22 nt, synthetic construct
  source 1..22: mol_type = other RNA
cctcgtgccgttgctcgactct

SEQ ID NO: 6824 - RNA, 22 nt, synthetic construct
  source 1..22: mol_type = other RNA
cctctgcgccgaggctgccatc

SEQ ID NO: 6825 - RNA, 22 nt, synthetic construct
  source 1..22: mol_type = other RNA
cctctggcatgtctcctccgaa

SEQ ID NO: 6826 - RNA, 22 nt, synthetic construct
  source 1..22: mol_type = other RNA
cctgaacctggcgaaggaacgc

SEQ ID NO: 6827 - RNA, 22 nt, synthetic construct
  source 1..22: mol_type = other RNA
cctgcaaggcaagaccaaggtg

SEQ ID NO: 6828 - RNA, 22 nt, synthetic construct
  source 1..22: mol_type = other RNA
cctgcagcgcctcgtgccgttg

SEQ ID NO: 6829 - RNA, 22 nt, synthetic construct
  source 1..22: mol_type = other RNA
cctgccacgctccgcgccagct

SEQ ID NO: 6830 - RNA, 22 nt, synthetic construct
  source 1..22: mol_type = other RNA
cctgcctcgcagtagcggtgtt

SEQ ID NO: 6831 - RNA, 22 nt, synthetic construct
  source 1..22: mol_type = other RNA
cctggacgcggtgctgtattgg

SEQ ID NO: 6832 - RNA, 22 nt, synthetic construct
  source 1..22: mol_type = other RNA
cctggcccccgtgcagcgcgca

SEQ ID NO: 6833 - RNA, 22 nt, synthetic construct
  source 1..22: mol_type = other RNA
cctggccgcttcgcccgctgtc

SEQ ID NO: 6834 - RNA, 22 nt, synthetic construct
  source 1..22: mol_type = other RNA
cctggcgaaggaacgcgaaccc

SEQ ID NO: 6835 - RNA, 22 nt, synthetic construct
  source 1..22: mol_type = other RNA
cctggcttgtgtcgctggcgtc

SEQ ID NO: 6836 - RNA, 22 nt, synthetic construct
  source 1..22: mol_type = other RNA
ccttcgccaggttcaggatcac

SEQ ID NO: 6837 - RNA, 22 nt, synthetic construct
  source 1..22: mol_type = other RNA
ccttctccaaggaggacgagct

SEQ ID NO: 6838 - RNA, 22 nt, synthetic construct
  source 1..22: mol_type = other RNA
ccttgcaggctcttgatggcag

SEQ ID NO: 6839 - RNA, 22 nt, synthetic construct
  source 1..22: mol_type = other RNA
ccttggagaaggcgagcgggaa

SEQ ID NO: 6840 - RNA, 22 nt, synthetic construct
  source 1..22: mol_type = other RNA
ccttggtcttgccttgcaggct

SEQ ID NO: 6841 - RNA, 22 nt, synthetic construct
  source 1..22: mol_type = other RNA
ccttgttagtcgccaacaccgc

SEQ ID NO: 6842 - RNA, 22 nt, synthetic construct
  source 1..22: mol_type = other RNA
cgaacccgtagagctggcgcgg

SEQ ID NO: 6843 - RNA, 22 nt, synthetic construct
  source 1..22: mol_type = other RNA
cgaagcagctcgtcctccttgg

SEQ ID NO: 6844 - RNA, 22 nt, synthetic construct
  source 1..22: mol_type = other RNA
cgaagcggccagggtccagcga

SEQ ID NO: 6845 - RNA, 22 nt, synthetic construct
  source 1..22: mol_type = other RNA
cgaaggaacgcgaacccgtaga

SEQ ID NO: 6846 - RNA, 22 nt, synthetic construct
  source 1..22: mol_type = other RNA
cgaatgcttgaacatgtgctcc

SEQ ID NO: 6847 - RNA, 22 nt, synthetic construct
  source 1..22: mol_type = other RNA
cgacacaagccagggccgcggg

SEQ ID NO: 6848 - RNA, 22 nt, synthetic construct
  source 1..22: mol_type = other RNA
cgacctgcagcgcctcgtgccg

SEQ ID NO: 6849 - RNA, 22 nt, synthetic construct
  source 1..22: mol_type = other RNA
cgacgacctgcagcgcctcgtg

SEQ ID NO: 6850 - RNA, 22 nt, synthetic construct
  source 1..22: mol_type = other RNA
cgacgcatggtagagaagcgcg

SEQ ID NO: 6851 - RNA, 22 nt, synthetic construct
  source 1..22: mol_type = other RNA
cgactaacaaggaggtggagcg

SEQ ID NO: 6852 - RNA, 22 nt, synthetic construct
  source 1..22: mol_type = other RNA
cgactctaaccgcttggaggcg

SEQ ID NO: 6853 - RNA, 22 nt, synthetic construct
  source 1..22: mol_type = other RNA
cgagcaacggcacgaggcgctg

SEQ ID NO: 6854 - RNA, 22 nt, synthetic construct
  source 1..22: mol_type = other RNA
cgagcgccagcgtgcccgagcg

SEQ ID NO: 6855 - RNA, 22 nt, synthetic construct
  source 1..22: mol_type = other RNA
cgagcgctccacctcgcgctcc

SEQ ID NO: 6856 - RNA, 22 nt, synthetic construct
  source 1..22: mol_type = other RNA
cgagcgggaagagccactcggc

SEQ ID NO: 6857 - RNA, 22 nt, synthetic construct
  source 1..22: mol_type = other RNA
cgagctgcttcggctgcacgcc

SEQ ID NO: 6858 - RNA, 22 nt, synthetic construct
  source 1..22: mol_type = other RNA
cgaggcaggcgtgcagccgaag

SEQ ID NO: 6859 - RNA, 22 nt, synthetic construct
  source 1..22: mol_type = other RNA
cgaggccacaagcggctccacg

SEQ ID NO: 6860 - RNA, 22 nt, synthetic construct
  source 1..22: mol_type = other RNA
cgaggcgctgcaggtcgtcggg

SEQ ID NO: 6861 - RNA, 22 nt, synthetic construct
  source 1..22: mol_type = other RNA
cgaggctgccatcaagagcctg

SEQ ID NO: 6862 - RNA, 22 nt, synthetic construct
  source 1..22: mol_type = other RNA
cgaggtggagcgctcgggcacg

SEQ ID NO: 6863 - RNA, 22 nt, synthetic construct
  source 1..22: mol_type = other RNA
cgagtggctcttcccgctcgcc

SEQ ID NO: 6864 - RNA, 22 nt, synthetic construct
  source 1..22: mol_type = other RNA
cgatgcactgcgcctccaagcg

SEQ ID NO: 6865 - RNA, 22 nt, synthetic construct
  source 1..22: mol_type = other RNA
cgcacggaccccgcgctgctgc

SEQ ID NO: 6866 - RNA, 22 nt, synthetic construct
  source 1..22: mol_type = other RNA
cgcagaggtagaaagccccgat

SEQ ID NO: 6867 - RNA, 22 nt, synthetic construct
  source 1..22: mol_type = other RNA
cgcagcagcgcggggtccgtgc

SEQ ID NO: 6868 - RNA, 22 nt, synthetic construct
  source 1..22: mol_type = other RNA
cgcagccgagtggctcttcccg

SEQ ID NO: 6869 - RNA, 22 nt, synthetic construct
  source 1..22: mol_type = other RNA
cgcagtagcggtgttggcgact

SEQ ID NO: 6870 - RNA, 22 nt, synthetic construct
  source 1..22: mol_type = other RNA
cgcagtgcatcggggctttcta

SEQ ID NO: 6871 - RNA, 22 nt, synthetic construct
  source 1..22: mol_type = other RNA
cgcagtggcgcagcagcgcggg

SEQ ID NO: 6872 - RNA, 22 nt, synthetic construct
  source 1..22: mol_type = other RNA
cgcagttgcccagcgccagcgc

SEQ ID NO: 6873 - RNA, 22 nt, synthetic construct
  source 1..22: mol_type = other RNA
cgcatggtagagaagcgcgcag

SEQ ID NO: 6874 - RNA, 22 nt, synthetic construct
  source 1..22: mol_type = other RNA
cgcattgggctgggcgtgatcc

SEQ ID NO: 6875 - RNA, 22 nt, synthetic construct
  source 1..22: mol_type = other RNA
cgccaacaccgctactgcgagg

SEQ ID NO: 6876 - RNA, 22 nt, synthetic construct
  source 1..22: mol_type = other RNA
cgccaccagcctctggcatgtc

SEQ ID NO: 6877 - RNA, 22 nt, synthetic construct
  source 1..22: mol_type = other RNA
cgccactgcgcgctggcgctgg

SEQ ID NO: 6878 - RNA, 22 nt, synthetic construct
  source 1..22: mol_type = other RNA
cgccagcgacacaagccagggc

SEQ ID NO: 6879 - RNA, 22 nt, synthetic construct
  source 1..22: mol_type = other RNA
cgccagcgcgcagtggcgcagc

SEQ ID NO: 6880 - RNA, 22 nt, synthetic construct
  source 1..22: mol_type = other RNA
cgccagcgtgcccgagcgctcc

SEQ ID NO: 6881 - RNA, 22 nt, synthetic construct
  source 1..22: mol_type = other RNA
cgccagctctacgggttcgcgt

SEQ ID NO: 6882 - RNA, 22 nt, synthetic construct
  source 1..22: mol_type = other RNA
cgccaggttcaggatcacgccc

SEQ ID NO: 6883 - RNA, 22 nt, synthetic construct
  source 1..22: mol_type = other RNA
cgcccgctgtctggtggacgcc

SEQ ID NO: 6884 - RNA, 22 nt, synthetic construct
  source 1..22: mol_type = other RNA
cgccgaggctgccatcaagagc

SEQ ID NO: 6885 - RNA, 22 nt, synthetic construct
  source 1..22: mol_type = other RNA
cgccgcacggaccccgcgctgc

SEQ ID NO: 6886 - RNA, 22 nt, synthetic construct
  source 1..22: mol_type = other RNA
cgccggccgccaccagcctctg

SEQ ID NO: 6887 - RNA, 22 nt, synthetic construct
  source 1..22: mol_type = other RNA
cgcctccaagcggttagagtcg

SEQ ID NO: 6888 - RNA, 22 nt, synthetic construct
  source 1..22: mol_type = other RNA
cgcctcgtgccgttgctcgact

SEQ ID NO: 6889 - RNA, 22 nt, synthetic construct
  source 1..22: mol_type = other RNA
cgcctgcctcgcagtagcggtg

SEQ ID NO: 6890 - RNA, 22 nt, synthetic construct
  source 1..22: mol_type = other RNA
cgcctggcccccgtgcagcgcg

SEQ ID NO: 6891 - RNA, 22 nt, synthetic construct
  source 1..22: mol_type = other RNA
cgccttctccaaggaggacgag

SEQ ID NO: 6892 - RNA, 22 nt, synthetic construct
  source 1..22: mol_type = other RNA
cgcgaacccgtagagctggcgc

SEQ ID NO: 6893 - RNA, 22 nt, synthetic construct
  source 1..22: mol_type = other RNA
cgcgaggtggagcgctcgggca

SEQ ID NO: 6894 - RNA, 22 nt, synthetic construct
  source 1..22: mol_type = other RNA
cgcgcagccgagtggctcttcc

SEQ ID NO: 6895 - RNA, 22 nt, synthetic construct
  source 1..22: mol_type = other RNA
cgcgcagtggcgcagcagcgcg

SEQ ID NO: 6896 - RNA, 22 nt, synthetic construct
  source 1..22: mol_type = other RNA
cgcgcagttgcccagcgccagc

SEQ ID NO: 6897 - RNA, 22 nt, synthetic construct
  source 1..22: mol_type = other RNA
cgcgcattgggctgggcgtgat

SEQ ID NO: 6898 - RNA, 22 nt, synthetic construct
  source 1..22: mol_type = other RNA
cgcgccagctctacgggttcgc

SEQ ID NO: 6899 - RNA, 22 nt, synthetic construct
  source 1..22: mol_type = other RNA
cgcgctccacctccttgttagt

SEQ ID NO: 6900 - RNA, 22 nt, synthetic construct
  source 1..22: mol_type = other RNA
cgcgctgcacgggggccaggcg

SEQ ID NO: 6901 - RNA, 22 nt, synthetic construct
  source 1..22: mol_type = other RNA
cgcgctgctgcgccactgcgcg

SEQ ID NO: 6902 - RNA, 22 nt, synthetic construct
  source 1..22: mol_type = other RNA
cgcgctggcgctgggcaactgc

SEQ ID NO: 6903 - RNA, 22 nt, synthetic construct
  source 1..22: mol_type = other RNA
cgcgcttctctaccatgcgtcg

SEQ ID NO: 6904 - RNA, 22 nt, synthetic construct
  source 1..22: mol_type = other RNA
cgcggagcgtggcaggcatctt

SEQ ID NO: 6905 - RNA, 22 nt, synthetic construct
  source 1..22: mol_type = other RNA
cgcggccctggcttgtgtcgct

SEQ ID NO: 6906 - RNA, 22 nt, synthetic construct
  source 1..22: mol_type = other RNA
cgcgggcccgacgacctgcagc

SEQ ID NO: 6907 - RNA, 22 nt, synthetic construct
  source 1..22: mol_type = other RNA
cgcggggtccgtgcggcggcac

SEQ ID NO: 6908 - RNA, 22 nt, synthetic construct
  source 1..22: mol_type = other RNA
cgcggtgctgtattggtgccgc

SEQ ID NO: 6909 - RNA, 22 nt, synthetic construct
  source 1..22: mol_type = other RNA
cgcgtccaggccgccggccgcc

SEQ ID NO: 6910 - RNA, 22 nt, synthetic construct
  source 1..22: mol_type = other RNA
cgcgtggcgcgcattgggctgg

SEQ ID NO: 6911 - RNA, 22 nt, synthetic construct
  source 1..22: mol_type = other RNA
cgcgttccttcgccaggttcag

SEQ ID NO: 6912 - RNA, 22 nt, synthetic construct
  source 1..22: mol_type = other RNA
cgctactgcgaggcaggcgtgc

SEQ ID NO: 6913 - RNA, 22 nt, synthetic construct
  source 1..22: mol_type = other RNA
cgctccacctccttgttagtcg

SEQ ID NO: 6914 - RNA, 22 nt, synthetic construct
  source 1..22: mol_type = other RNA
cgctccacctcgcgctccacct

SEQ ID NO: 6915 - RNA, 22 nt, synthetic construct
  source 1..22: mol_type = other RNA
cgctccgcgccagctctacggg

SEQ ID NO: 6916 - RNA, 22 nt, synthetic construct
  source 1..22: mol_type = other RNA
cgctcgccttctccaaggagga

SEQ ID NO: 6917 - RNA, 22 nt, synthetic construct
  source 1..22: mol_type = other RNA
cgctcgggcacgctggcgctcg

SEQ ID NO: 6918 - RNA, 22 nt, synthetic construct
  source 1..22: mol_type = other RNA
cgctcgtggagccgcttgtggc

SEQ ID NO: 6919 - RNA, 22 nt, synthetic construct
  source 1..22: mol_type = other RNA
cgctgcaccgcctggcccccgt

SEQ ID NO: 6920 - RNA, 22 nt, synthetic construct
  source 1..22: mol_type = other RNA
cgctgcacgggggccaggcggt

SEQ ID NO: 6921 - RNA, 22 nt, synthetic construct
  source 1..22: mol_type = other RNA
cgctgcaggtcgtcgggcccgc

SEQ ID NO: 6922 - RNA, 22 nt, synthetic construct
  source 1..22: mol_type = other RNA
cgctgctgcgccactgcgcgct

SEQ ID NO: 6923 - RNA, 22 nt, synthetic construct
  source 1..22: mol_type = other RNA
cgctggaccctggccgcttcgc

SEQ ID NO: 6924 - RNA, 22 nt, synthetic construct
  source 1..22: mol_type = other RNA
cgctggcgctcgtggagccgct

SEQ ID NO: 6925 - RNA, 22 nt, synthetic construct
  source 1..22: mol_type = other RNA
cgctggcgctgggcaactgcgc

SEQ ID NO: 6926 - RNA, 22 nt, synthetic construct
  source 1..22: mol_type = other RNA
cgctggcgtccaccagacagcg

SEQ ID NO: 6927 - RNA, 22 nt, synthetic construct
  source 1..22: mol_type = other RNA
cgctgggcaactgcgcgctgca

SEQ ID NO: 6928 - RNA, 22 nt, synthetic construct
  source 1..22: mol_type = other RNA
cgctgtctggtggacgccagcg

SEQ ID NO: 6929 - RNA, 22 nt, synthetic construct
  source 1..22: mol_type = other RNA
cgcttcgcccgctgtctggtgg

SEQ ID NO: 6930 - RNA, 22 nt, synthetic construct
  source 1..22: mol_type = other RNA
cgcttctctaccatgcgtcgct

SEQ ID NO: 6931 - RNA, 22 nt, synthetic construct
  source 1..22: mol_type = other RNA
cgcttggaggcgcagtgcatcg

SEQ ID NO: 6932 - RNA, 22 nt, synthetic construct
  source 1..22: mol_type = other RNA
cgcttgtggcctcgctggaccc

SEQ ID NO: 6933 - RNA, 22 nt, synthetic construct
  source 1..22: mol_type = other RNA
cggaccccgcgctgctgcgcca

SEQ ID NO: 6934 - RNA, 22 nt, synthetic construct
  source 1..22: mol_type = other RNA
cggagcgtggcaggcatcttgg

SEQ ID NO: 6935 - RNA, 22 nt, synthetic construct
  source 1..22: mol_type = other RNA
cggaggagacatgccagaggct

SEQ ID NO: 6936 - RNA, 22 nt, synthetic construct
  source 1..22: mol_type = other RNA
cggcaccaatacagcaccgcgt

SEQ ID NO: 6937 - RNA, 22 nt, synthetic construct
  source 1..22: mol_type = other RNA
cggcacgaggcgctgcaggtcg

SEQ ID NO: 6938 - RNA, 22 nt, synthetic construct
  source 1..22: mol_type = other RNA
cggccagggtccagcgaggcca

SEQ ID NO: 6939 - RNA, 22 nt, synthetic construct
  source 1..22: mol_type = other RNA
cggccctggcttgtgtcgctgg

SEQ ID NO: 6940 - RNA, 22 nt, synthetic construct
  source 1..22: mol_type = other RNA
cggccgccaccagcctctggca

SEQ ID NO: 6941 - RNA, 22 nt, synthetic construct
  source 1..22: mol_type = other RNA
cggccggcggcctggacgcggt

SEQ ID NO: 6942 - RNA, 22 nt, synthetic construct
  source 1..22: mol_type = other RNA
cggcctggacgcggtgctgtat

SEQ ID NO: 6943 - RNA, 22 nt, synthetic construct
  source 1..22: mol_type = other RNA
cggcgcagaggtagaaagcccc

SEQ ID NO: 6944 - RNA, 22 nt, synthetic construct
  source 1..22: mol_type = other RNA
cggcggcaccaatacagcaccg

SEQ ID NO: 6945 - RNA, 22 nt, synthetic construct
  source 1..22: mol_type = other RNA
cggcggcctggacgcggtgctg

SEQ ID NO: 6946 - RNA, 22 nt, synthetic construct
  source 1..22: mol_type = other RNA
cggctccacgagcgccagcgtg

SEQ ID NO: 6947 - RNA, 22 nt, synthetic construct
  source 1..22: mol_type = other RNA
cggctgcacgcctgcctcgcag

SEQ ID NO: 6948 - RNA, 22 nt, synthetic construct
  source 1..22: mol_type = other RNA
cggctgcgcgcttctctaccat

SEQ ID NO: 6949 - RNA, 22 nt, synthetic construct
  source 1..22: mol_type = other RNA
cgggaagagccactcggctgcg

SEQ ID NO: 6950 - RNA, 22 nt, synthetic construct
  source 1..22: mol_type = other RNA
cgggcacgctggcgctcgtgga

SEQ ID NO: 6951 - RNA, 22 nt, synthetic construct
  source 1..22: mol_type = other RNA
cgggcccgacgacctgcagcgc

SEQ ID NO: 6952 - RNA, 22 nt, synthetic construct
  source 1..22: mol_type = other RNA
cgggcccgcggccctggcttgt

SEQ ID NO: 6953 - RNA, 22 nt, synthetic construct
  source 1..22: mol_type = other RNA
cgggcgaagcggccagggtcca

SEQ ID NO: 6954 - RNA, 22 nt, synthetic construct
  source 1..22: mol_type = other RNA
cggggctttctacctctgcgcc

SEQ ID NO: 6955 - RNA, 22 nt, synthetic construct
  source 1..22: mol_type = other RNA
cgggggccaggcggtgcagcga

SEQ ID NO: 6956 - RNA, 22 nt, synthetic construct
  source 1..22: mol_type = other RNA
cggggtccgtgcggcggcacca

SEQ ID NO: 6957 - RNA, 22 nt, synthetic construct
  source 1..22: mol_type = other RNA
cgggttcgcgttccttcgccag

SEQ ID NO: 6958 - RNA, 22 nt, synthetic construct
  source 1..22: mol_type = other RNA
cggtgcagcgacgcatggtaga

SEQ ID NO: 6959 - RNA, 22 nt, synthetic construct
  source 1..22: mol_type = other RNA
cggtgctgtattggtgccgccg

SEQ ID NO: 6960 - RNA, 22 nt, synthetic construct
  source 1..22: mol_type = other RNA
cggtgttggcgactaacaagga

SEQ ID NO: 6961 - RNA, 22 nt, synthetic construct
  source 1..22: mol_type = other RNA
cggttagagtcgagcaacggca

SEQ ID NO: 6962 - RNA, 22 nt, synthetic construct
  source 1..22: mol_type = other RNA
cgtagagctggcgcggagcgtg

SEQ ID NO: 6963 - RNA, 22 nt, synthetic construct
  source 1..22: mol_type = other RNA
cgtccaccagacagcgggcgaa

SEQ ID NO: 6964 - RNA, 22 nt, synthetic construct
  source 1..22: mol_type = other RNA
cgtccaggccgccggccgccac

SEQ ID NO: 6965 - RNA, 22 nt, synthetic construct
  source 1..22: mol_type = other RNA
cgtcctccttggagaaggcgag

SEQ ID NO: 6966 - RNA, 22 nt, synthetic construct
  source 1..22: mol_type = other RNA
cgtcgctgcaccgcctggcccc

SEQ ID NO: 6967 - RNA, 22 nt, synthetic construct
  source 1..22: mol_type = other RNA
cgtcgggcccgcggccctggct

SEQ ID NO: 6968 - RNA, 22 nt, synthetic construct
  source 1..22: mol_type = other RNA
cgtgatcctgaacctggcgaag

SEQ ID NO: 6969 - RNA, 22 nt, synthetic construct
  source 1..22: mol_type = other RNA
cgtgcagccgaagcagctcgtc

SEQ ID NO: 6970 - RNA, 22 nt, synthetic construct
  source 1..22: mol_type = other RNA
cgtgcagcgcgcagttgcccag

SEQ ID NO: 6971 - RNA, 22 nt, synthetic construct
  source 1..22: mol_type = other RNA
cgtgcccgagcgctccacctcg

SEQ ID NO: 6972 - RNA, 22 nt, synthetic construct
  source 1..22: mol_type = other RNA
cgtgccgttgctcgactctaac

SEQ ID NO: 6973 - RNA, 22 nt, synthetic construct
  source 1..22: mol_type = other RNA
cgtgcggcggcaccaatacagc

SEQ ID NO: 6974 - RNA, 22 nt, synthetic construct
  source 1..22: mol_type = other RNA
cgtggagccgcttgtggcctcg

SEQ ID NO: 6975 - RNA, 22 nt, synthetic construct
  source 1..22: mol_type = other RNA
cgtggcaggcatcttggagcac

SEQ ID NO: 6976 - RNA, 22 nt, synthetic construct
  source 1..22: mol_type = other RNA
cgtggcgcgcattgggctgggc

SEQ ID NO: 6977 - RNA, 22 nt, synthetic construct
  source 1..22: mol_type = other RNA
cgttccttcgccaggttcagga

SEQ ID NO: 6978 - RNA, 22 nt, synthetic construct
  source 1..22: mol_type = other RNA
cgttgctcgactctaaccgctt

SEQ ID NO: 6979 - RNA, 22 nt, synthetic construct
  source 1..22: mol_type = other RNA
ctaacaaggaggtggagcgcga

SEQ ID NO: 6980 - RNA, 22 nt, synthetic construct
  source 1..22: mol_type = other RNA
ctaaccgcttggaggcgcagtg

SEQ ID NO: 6981 - RNA, 22 nt, synthetic construct
  source 1..22: mol_type = other RNA
ctaccatgcgtcgctgcaccgc

SEQ ID NO: 6982 - RNA, 22 nt, synthetic construct
  source 1..22: mol_type = other RNA
ctacctctgcgccgaggctgcc

SEQ ID NO: 6983 - RNA, 22 nt, synthetic construct
  source 1..22: mol_type = other RNA
ctacgggttcgcgttccttcgc

SEQ ID NO: 6984 - RNA, 22 nt, synthetic construct
  source 1..22: mol_type = other RNA
ctactgcgaggcaggcgtgcag

SEQ ID NO: 6985 - RNA, 22 nt, synthetic construct
  source 1..22: mol_type = other RNA
ctccaagatgcctgccacgctc

SEQ ID NO: 6986 - RNA, 22 nt, synthetic construct
  source 1..22: mol_type = other RNA
ctccaagcggttagagtcgagc

SEQ ID NO: 6987 - RNA, 22 nt, synthetic construct
  source 1..22: mol_type = other RNA
ctccaaggaggacgagctgctt

SEQ ID NO: 6988 - RNA, 22 nt, synthetic construct
  source 1..22: mol_type = other RNA
ctccacctccttgttagtcgcc

SEQ ID NO: 6989 - RNA, 22 nt, synthetic construct
  source 1..22: mol_type = other RNA
ctccacctcgcgctccacctcc

SEQ ID NO: 6990 - RNA, 22 nt, synthetic construct
  source 1..22: mol_type = other RNA
ctccacgagcgccagcgtgccc

SEQ ID NO: 6991 - RNA, 22 nt, synthetic construct
  source 1..22: mol_type = other RNA
ctccgaatgcttgaacatgtgc

SEQ ID NO: 6992 - RNA, 22 nt, synthetic construct
  source 1..22: mol_type = other RNA
ctccgcgccagctctacgggtt

SEQ ID NO: 6993 - RNA, 22 nt, synthetic construct
  source 1..22: mol_type = other RNA
ctcctccgaatgcttgaacatg

SEQ ID NO: 6994 - RNA, 22 nt, synthetic construct
  source 1..22: mol_type = other RNA
ctccttggagaaggcgagcggg

SEQ ID NO: 6995 - RNA, 22 nt, synthetic construct
  source 1..22: mol_type = other RNA
ctccttgttagtcgccaacacc

SEQ ID NO: 6996 - RNA, 22 nt, synthetic construct
  source 1..22: mol_type = other RNA
ctcgactctaaccgcttggagg

SEQ ID NO: 6997 - RNA, 22 nt, synthetic construct
  source 1..22: mol_type = other RNA
ctcgcagtagcggtgttggcga

SEQ ID NO: 6998 - RNA, 22 nt, synthetic construct
  source 1..22: mol_type = other RNA
ctcgccttctccaaggaggacg

SEQ ID NO: 6999 - RNA, 22 nt, synthetic construct
  source 1..22: mol_type = other RNA
ctcgcgctccacctccttgtta

SEQ ID NO: 7000 - RNA, 22 nt, synthetic construct
  source 1..22: mol_type = other RNA
ctcgctggaccctggccgcttc

SEQ ID NO: 7001 - RNA, 22 nt, synthetic construct
  source 1..22: mol_type = other RNA
ctcggcgcagaggtagaaagcc

SEQ ID NO: 7002 - RNA, 22 nt, synthetic construct
  source 1..22: mol_type = other RNA
ctcggctgcgcgcttctctacc

SEQ ID NO: 7003 - RNA, 22 nt, synthetic construct
  source 1..22: mol_type = other RNA
ctcgggcacgctggcgctcgtg

SEQ ID NO: 7004 - RNA, 22 nt, synthetic construct
  source 1..22: mol_type = other RNA
ctcgtcctccttggagaaggcg

SEQ ID NO: 7005 - RNA, 22 nt, synthetic construct
  source 1..22: mol_type = other RNA
ctcgtgccgttgctcgactcta

SEQ ID NO: 7006 - RNA, 22 nt, synthetic construct
  source 1..22: mol_type = other RNA
ctcgtggagccgcttgtggcct

SEQ ID NO: 7007 - RNA, 22 nt, synthetic construct
  source 1..22: mol_type = other RNA
ctctaaccgcttggaggcgcag

SEQ ID NO: 7008 - RNA, 22 nt, synthetic construct
  source 1..22: mol_type = other RNA
ctctaccatgcgtcgctgcacc

SEQ ID NO: 7009 - RNA, 22 nt, synthetic construct
  source 1..22: mol_type = other RNA
ctctacgggttcgcgttccttc

SEQ ID NO: 7010 - RNA, 22 nt, synthetic construct
  source 1..22: mol_type = other RNA
ctctgcgccgaggctgccatca

SEQ ID NO: 7011 - RNA, 22 nt, synthetic construct
  source 1..22: mol_type = other RNA
ctctggcatgtctcctccgaat

SEQ ID NO: 7012 - RNA, 22 nt, synthetic construct
  source 1..22: mol_type = other RNA
ctcttcccgctcgccttctcca

SEQ ID NO: 7013 - RNA, 22 nt, synthetic construct
  source 1..22: mol_type = other RNA
ctcttgatggcagcctcggcgc

SEQ ID NO: 7014 - RNA, 22 nt, synthetic construct
  source 1..22: mol_type = other RNA
ctgaacctggcgaaggaacgcg

SEQ ID NO: 7015 - RNA, 22 nt, synthetic construct
  source 1..22: mol_type = other RNA
ctgcaaggcaagaccaaggtgg

SEQ ID NO: 7016 - RNA, 22 nt, synthetic construct
  source 1..22: mol_type = other RNA
ctgcacccaccttggtcttgcc

SEQ ID NO: 7017 - RNA, 22 nt, synthetic construct
  source 1..22: mol_type = other RNA
ctgcaccgcctggcccccgtgc

SEQ ID NO: 7018 - RNA, 22 nt, synthetic construct
  source 1..22: mol_type = other RNA
ctgcacgcctgcctcgcagtag

SEQ ID NO: 7019 - RNA, 22 nt, synthetic construct
  source 1..22: mol_type = other RNA
ctgcacgggggccaggcggtgc

SEQ ID NO: 7020 - RNA, 22 nt, synthetic construct
  source 1..22: mol_type = other RNA
ctgcagcgcctcgtgccgttgc

SEQ ID NO: 7021 - RNA, 22 nt, synthetic construct
  source 1..22: mol_type = other RNA
ctgcaggtcgtcgggcccgcgg

SEQ ID NO: 7022 - RNA, 22 nt, synthetic construct
  source 1..22: mol_type = other RNA
ctgccacgctccgcgccagctc

SEQ ID NO: 7023 - RNA, 22 nt, synthetic construct
  source 1..22: mol_type = other RNA
ctgccatcaagagcctgcaagg

SEQ ID NO: 7024 - RNA, 22 nt, synthetic construct
  source 1..22: mol_type = other RNA
ctgcctcgcagtagcggtgttg

SEQ ID NO: 7025 - RNA, 22 nt, synthetic construct
  source 1..22: mol_type = other RNA
ctgcgaggcaggcgtgcagccg

SEQ ID NO: 7026 - RNA, 22 nt, synthetic construct
  source 1..22: mol_type = other RNA
ctgcgccactgcgcgctggcgc

SEQ ID NO: 7027 - RNA, 22 nt, synthetic construct
  source 1..22: mol_type = other RNA
ctgcgccgaggctgccatcaag

SEQ ID NO: 7028 - RNA, 22 nt, synthetic construct
  source 1..22: mol_type = other RNA
ctgcgcctccaagcggttagag

SEQ ID NO: 7029 - RNA, 22 nt, synthetic construct
  source 1..22: mol_type = other RNA
ctgcgcgctgcacgggggccag

SEQ ID NO: 7030 - RNA, 22 nt, synthetic construct
  source 1..22: mol_type = other RNA
ctgcgcgctggcgctgggcaac

SEQ ID NO: 7031 - RNA, 22 nt, synthetic construct
  source 1..22: mol_type = other RNA
ctgcgcgcttctctaccatgcg

SEQ ID NO: 7032 - RNA, 22 nt, synthetic construct
  source 1..22: mol_type = other RNA
ctgctgcgccactgcgcgctgg

SEQ ID NO: 7033 - RNA, 22 nt, synthetic construct
  source 1..22: mol_type = other RNA
ctgcttcggctgcacgcctgcc

SEQ ID NO: 7034 - RNA, 22 nt, synthetic construct
  source 1..22: mol_type = other RNA
ctggaccctggccgcttcgccc

SEQ ID NO: 7035 - RNA, 22 nt, synthetic construct
  source 1..22: mol_type = other RNA
ctggacgcggtgctgtattggt

SEQ ID NO: 7036 - RNA, 22 nt, synthetic construct
  source 1..22: mol_type = other RNA
ctggcatgtctcctccgaatgc

SEQ ID NO: 7037 - RNA, 22 nt, synthetic construct
  source 1..22: mol_type = other RNA
ctggcccccgtgcagcgcgcag

SEQ ID NO: 7038 - RNA, 22 nt, synthetic construct
  source 1..22: mol_type = other RNA
ctggccgcttcgcccgctgtct

SEQ ID NO: 7039 - RNA, 22 nt, synthetic construct
  source 1..22: mol_type = other RNA
ctggcgaaggaacgcgaacccg

SEQ ID NO: 7040 - RNA, 22 nt, synthetic construct
  source 1..22: mol_type = other RNA
ctggcgcggagcgtggcaggca

SEQ ID NO: 7041 - RNA, 22 nt, synthetic construct
  source 1..22: mol_type = other RNA
ctggcgctcgtggagccgcttg

SEQ ID NO: 7042 - RNA, 22 nt, synthetic construct
  source 1..22: mol_type = other RNA
ctggcgctgggcaactgcgcgc

SEQ ID NO: 7043 - RNA, 22 nt, synthetic construct
  source 1..22: mol_type = other RNA
ctggcgtccaccagacagcggg

SEQ ID NO: 7044 - RNA, 22 nt, synthetic construct
  source 1..22: mol_type = other RNA
ctggcttgtgtcgctggcgtcc

SEQ ID NO: 7045 - RNA, 22 nt, synthetic construct
  source 1..22: mol_type = other RNA
ctgggcaactgcgcgctgcacg

SEQ ID NO: 7046 - RNA, 22 nt, synthetic construct
  source 1..22: mol_type = other RNA
ctgggcgtgatcctgaacctgg

SEQ ID NO: 7047 - RNA, 22 nt, synthetic construct
  source 1..22: mol_type = other RNA
ctggtggacgccagcgacacaa

SEQ ID NO: 7048 - RNA, 22 nt, synthetic construct
  source 1..22: mol_type = other RNA
ctggtggcggccggcggcctgg

SEQ ID NO: 7049 - RNA, 22 nt, synthetic construct
  source 1..22: mol_type = other RNA
ctgtattggtgccgccgcacgg

SEQ ID NO: 7050 - RNA, 22 nt, synthetic construct
  source 1..22: mol_type = other RNA
ctgtctggtggacgccagcgac

SEQ ID NO: 7051 - RNA, 22 nt, synthetic construct
  source 1..22: mol_type = other RNA
cttcccgctcgccttctccaag

SEQ ID NO: 7052 - RNA, 22 nt, synthetic construct
  source 1..22: mol_type = other RNA
cttcgccaggttcaggatcacg

SEQ ID NO: 7053 - RNA, 22 nt, synthetic construct
  source 1..22: mol_type = other RNA
cttcgcccgctgtctggtggac

SEQ ID NO: 7054 - RNA, 22 nt, synthetic construct
  source 1..22: mol_type = other RNA
cttcggctgcacgcctgcctcg

SEQ ID NO: 7055 - RNA, 22 nt, synthetic construct
  source 1..22: mol_type = other RNA
cttctccaaggaggacgagctg

SEQ ID NO: 7056 - RNA, 22 nt, synthetic construct
  source 1..22: mol_type = other RNA
cttctctaccatgcgtcgctgc

SEQ ID NO: 7057 - RNA, 22 nt, synthetic construct
  source 1..22: mol_type = other RNA
cttgaacatgtgctccaagatg

SEQ ID NO: 7058 - RNA, 22 nt, synthetic construct
  source 1..22: mol_type = other RNA
cttgatggcagcctcggcgcag

SEQ ID NO: 7059 - RNA, 22 nt, synthetic construct
  source 1..22: mol_type = other RNA
cttgcaggctcttgatggcagc

SEQ ID NO: 7060 - RNA, 22 nt, synthetic construct
  source 1..22: mol_type = other RNA
cttgccttgcaggctcttgatg

SEQ ID NO: 7061 - RNA, 22 nt, synthetic construct
  source 1..22: mol_type = other RNA
cttggagaaggcgagcgggaag

SEQ ID NO: 7062 - RNA, 22 nt, synthetic construct
  source 1..22: mol_type = other RNA
cttggagcacatgttcaagcat

SEQ ID NO: 7063 - RNA, 22 nt, synthetic construct
  source 1..22: mol_type = other RNA
cttggaggcgcagtgcatcggg

SEQ ID NO: 7064 - RNA, 22 nt, synthetic construct
  source 1..22: mol_type = other RNA
cttggtcttgccttgcaggctc

SEQ ID NO: 7065 - RNA, 22 nt, synthetic construct
  source 1..22: mol_type = other RNA
cttgtggcctcgctggaccctg

SEQ ID NO: 7066 - RNA, 22 nt, synthetic construct
  source 1..22: mol_type = other RNA
cttgtgtcgctggcgtccacca

SEQ ID NO: 7067 - RNA, 22 nt, synthetic construct
  source 1..22: mol_type = other RNA
cttgttagtcgccaacaccgct

SEQ ID NO: 7068 - RNA, 22 nt, synthetic construct
  source 1..22: mol_type = other RNA
ctttctacctctgcgccgaggc

SEQ ID NO: 7069 - RNA, 22 nt, synthetic construct
  source 1..22: mol_type = other RNA
gaaagccccgatgcactgcgcc

SEQ ID NO: 7070 - RNA, 22 nt, synthetic construct
  source 1..22: mol_type = other RNA
gaacatgtgctccaagatgcct

SEQ ID NO: 7071 - RNA, 22 nt, synthetic construct
  source 1..22: mol_type = other RNA
gaacccgtagagctggcgcgga

SEQ ID NO: 7072 - RNA, 22 nt, synthetic construct
  source 1..22: mol_type = other RNA
gaacctggcgaaggaacgcgaa

SEQ ID NO: 7073 - RNA, 22 nt, synthetic construct
  source 1..22: mol_type = other RNA
gaacgcgaacccgtagagctgg

SEQ ID NO: 7074 - RNA, 22 nt, synthetic construct
  source 1..22: mol_type = other RNA
gaagagccactcggctgcgcgc

SEQ ID NO: 7075 - RNA, 22 nt, synthetic construct
  source 1..22: mol_type = other RNA
gaagcagctcgtcctccttgga

SEQ ID NO: 7076 - RNA, 22 nt, synthetic construct
  source 1..22: mol_type = other RNA
gaagcgcgcagccgagtggctc

SEQ ID NO: 7077 - RNA, 22 nt, synthetic construct
  source 1..22: mol_type = other RNA
gaagcggccagggtccagcgag

SEQ ID NO: 7078 - RNA, 22 nt, synthetic construct
  source 1..22: mol_type = other RNA
gaaggaacgcgaacccgtagag

SEQ ID NO: 7079 - RNA, 22 nt, synthetic construct
  source 1..22: mol_type = other RNA
gaaggcgagcgggaagagccac

SEQ ID NO: 7080 - RNA, 22 nt, synthetic construct
  source 1..22: mol_type = other RNA
gaatgcttgaacatgtgctcca

SEQ ID NO: 7081 - RNA, 22 nt, synthetic construct
  source 1..22: mol_type = other RNA
gacacaagccagggccgcgggc

SEQ ID NO: 7082 - RNA, 22 nt, synthetic construct
  source 1..22: mol_type = other RNA
gacagcgggcgaagcggccagg

SEQ ID NO: 7083 - RNA, 22 nt, synthetic construct
  source 1..22: mol_type = other RNA
gacatgccagaggctggtggcg

SEQ ID NO: 7084 - RNA, 22 nt, synthetic construct
  source 1..22: mol_type = other RNA
gaccaaggtgggtgcagatgtg

SEQ ID NO: 7085 - RNA, 22 nt, synthetic construct
  source 1..22: mol_type = other RNA
gaccccgcgctgctgcgccact

SEQ ID NO: 7086 - RNA, 22 nt, synthetic construct
  source 1..22: mol_type = other RNA
gaccctggccgcttcgcccgct

SEQ ID NO: 7087 - RNA, 22 nt, synthetic construct
  source 1..22: mol_type = other RNA
gaccgcgtggcgcgcattgggc

SEQ ID NO: 7088 - RNA, 22 nt, synthetic construct
  source 1..22: mol_type = other RNA
gacctgcagcgcctcgtgccgt

SEQ ID NO: 7089 - RNA, 22 nt, synthetic construct
  source 1..22: mol_type = other RNA
gacgacctgcagcgcctcgtgc

SEQ ID NO: 7090 - RNA, 22 nt, synthetic construct
  source 1..22: mol_type = other RNA
gacgagctgcttcggctgcacg

SEQ ID NO: 7091 - RNA, 22 nt, synthetic construct
  source 1..22: mol_type = other RNA
gacgcatggtagagaagcgcgc

SEQ ID NO: 7092 - RNA, 22 nt, synthetic construct
  source 1..22: mol_type = other RNA
gacgccagcgacacaagccagg

SEQ ID NO: 7093 - RNA, 22 nt, synthetic construct
  source 1..22: mol_type = other RNA
gacgcggtgctgtattggtgcc

SEQ ID NO: 7094 - RNA, 22 nt, synthetic construct
  source 1..22: mol_type = other RNA
gactaacaaggaggtggagcgc

SEQ ID NO: 7095 - RNA, 22 nt, synthetic construct
  source 1..22: mol_type = other RNA
gactctaaccgcttggaggcgc

SEQ ID NO: 7096 - RNA, 22 nt, synthetic construct
  source 1..22: mol_type = other RNA
gagaagcgcgcagccgagtggc

SEQ ID NO: 7097 - RNA, 22 nt, synthetic construct
  source 1..22: mol_type = other RNA
gagaaggcgagcgggaagagcc

SEQ ID NO: 7098 - RNA, 22 nt, synthetic construct
  source 1..22: mol_type = other RNA
gagacatgccagaggctggtgg

SEQ ID NO: 7099 - RNA, 22 nt, synthetic construct
  source 1..22: mol_type = other RNA
gagcaacggcacgaggcgctgc

SEQ ID NO: 7100 - RNA, 22 nt, synthetic construct
  source 1..22: mol_type = other RNA
gagcacatgttcaagcattcgg

SEQ ID NO: 7101 - RNA, 22 nt, synthetic construct
  source 1..22: mol_type = other RNA
gagccactcggctgcgcgcttc

SEQ ID NO: 7102 - RNA, 22 nt, synthetic construct
  source 1..22: mol_type = other RNA
gagccgcttgtggcctcgctgg

SEQ ID NO: 7103 - RNA, 22 nt, synthetic construct
  source 1..22: mol_type = other RNA
gagcctgcaaggcaagaccaag

SEQ ID NO: 7104 - RNA, 22 nt, synthetic construct
  source 1..22: mol_type = other RNA
gagcgccagcgtgcccgagcgc

SEQ ID NO: 7105 - RNA, 22 nt, synthetic construct
  source 1..22: mol_type = other RNA
gagcgcgaggtggagcgctcgg

SEQ ID NO: 7106 - RNA, 22 nt, synthetic construct
  source 1..22: mol_type = other RNA
gagcgctccacctcgcgctcca

SEQ ID NO: 7107 - RNA, 22 nt, synthetic construct
  source 1..22: mol_type = other RNA
gagcgctcgggcacgctggcgc

SEQ ID NO: 7108 - RNA, 22 nt, synthetic construct
  source 1..22: mol_type = other RNA
gagcgggaagagccactcggct

SEQ ID NO: 7109 - RNA, 22 nt, synthetic construct
  source 1..22: mol_type = other RNA
gagcgtggcaggcatcttggag

SEQ ID NO: 7110 - RNA, 22 nt, synthetic construct
  source 1..22: mol_type = other RNA
gagctgcttcggctgcacgcct

SEQ ID NO: 7111 - RNA, 22 nt, synthetic construct
  source 1..22: mol_type = other RNA
gagctggcgcggagcgtggcag

SEQ ID NO: 7112 - RNA, 22 nt, synthetic construct
  source 1..22: mol_type = other RNA
gaggacgagctgcttcggctgc

SEQ ID NO: 7113 - RNA, 22 nt, synthetic construct
  source 1..22: mol_type = other RNA
gaggagacatgccagaggctgg

SEQ ID NO: 7114 - RNA, 22 nt, synthetic construct
  source 1..22: mol_type = other RNA
gaggcaggcgtgcagccgaagc

SEQ ID NO: 7115 - RNA, 22 nt, synthetic construct
  source 1..22: mol_type = other RNA
gaggccacaagcggctccacga

SEQ ID NO: 7116 - RNA, 22 nt, synthetic construct
  source 1..22: mol_type = other RNA
gaggcgcagtgcatcggggctt

SEQ ID NO: 7117 - RNA, 22 nt, synthetic construct
  source 1..22: mol_type = other RNA
gaggcgctgcaggtcgtcgggc

SEQ ID NO: 7118 - RNA, 22 nt, synthetic construct
  source 1..22: mol_type = other RNA
gaggctgccatcaagagcctgc

SEQ ID NO: 7119 - RNA, 22 nt, synthetic construct
  source 1..22: mol_type = other RNA
gaggctggtggcggccggcggc

SEQ ID NO: 7120 - RNA, 22 nt, synthetic construct
  source 1..22: mol_type = other RNA
gaggtagaaagccccgatgcac

SEQ ID NO: 7121 - RNA, 22 nt, synthetic construct
  source 1..22: mol_type = other RNA
gaggtggagcgcgaggtggagc

SEQ ID NO: 7122 - RNA, 22 nt, synthetic construct
  source 1..22: mol_type = other RNA
gaggtggagcgctcgggcacgc

SEQ ID NO: 7123 - RNA, 22 nt, synthetic construct
  source 1..22: mol_type = other RNA
gagtcgagcaacggcacgaggc

SEQ ID NO: 7124 - RNA, 22 nt, synthetic construct
  source 1..22: mol_type = other RNA
gagtggctcttcccgctcgcct

SEQ ID NO: 7125 - RNA, 22 nt, synthetic construct
  source 1..22: mol_type = other RNA
gatcacgcccagcccaatgcgc

SEQ ID NO: 7126 - RNA, 22 nt, synthetic construct
  source 1..22: mol_type = other RNA
gatccacccaaccccacatctg

SEQ ID NO: 7127 - RNA, 22 nt, synthetic construct
  source 1..22: mol_type = other RNA
gatcctgaacctggcgaaggaa

SEQ ID NO: 7128 - RNA, 22 nt, synthetic construct
  source 1..22: mol_type = other RNA
gatgcactgcgcctccaagcgg

SEQ ID NO: 7129 - RNA, 22 nt, synthetic construct
  source 1..22: mol_type = other RNA
gatgcctgccacgctccgcgcc

SEQ ID NO: 7130 - RNA, 22 nt, synthetic construct
  source 1..22: mol_type = other RNA
gatggcagcctcggcgcagagg

SEQ ID NO: 7131 - RNA, 22 nt, synthetic construct
  source 1..22: mol_type = other RNA
gcaacggcacgaggcgctgcag

SEQ ID NO: 7132 - RNA, 22 nt, synthetic construct
  source 1..22: mol_type = other RNA
gcaactgcgcgctgcacggggg

SEQ ID NO: 7133 - RNA, 22 nt, synthetic construct
  source 1..22: mol_type = other RNA
gcaagaccaaggtgggtgcaga

SEQ ID NO: 7134 - RNA, 22 nt, synthetic construct
  source 1..22: mol_type = other RNA
gcaaggcaagaccaaggtgggt

SEQ ID NO: 7135 - RNA, 22 nt, synthetic construct
  source 1..22: mol_type = other RNA
gcacatgttcaagcattcggag

SEQ ID NO: 7136 - RNA, 22 nt, synthetic construct
  source 1..22: mol_type = other RNA
gcaccaatacagcaccgcgtcc

SEQ ID NO: 7137 - RNA, 22 nt, synthetic construct
  source 1..22: mol_type = other RNA
gcacccaccttggtcttgcctt

SEQ ID NO: 7138 - RNA, 22 nt, synthetic construct
  source 1..22: mol_type = other RNA
gcaccgcctggcccccgtgcag

SEQ ID NO: 7139 - RNA, 22 nt, synthetic construct
  source 1..22: mol_type = other RNA
gcaccgcgtccaggccgccggc

SEQ ID NO: 7140 - RNA, 22 nt, synthetic construct
  source 1..22: mol_type = other RNA
gcacgaggcgctgcaggtcgtc

SEQ ID NO: 7141 - RNA, 22 nt, synthetic construct
  source 1..22: mol_type = other RNA
gcacgcctgcctcgcagtagcg

SEQ ID NO: 7142 - RNA, 22 nt, synthetic construct
  source 1..22: mol_type = other RNA
gcacgctggcgctcgtggagcc

SEQ ID NO: 7143 - RNA, 22 nt, synthetic construct
  source 1..22: mol_type = other RNA
gcacggaccccgcgctgctgcg

SEQ ID NO: 7144 - RNA, 22 nt, synthetic construct
  source 1..22: mol_type = other RNA
gcacgggggccaggcggtgcag

SEQ ID NO: 7145 - RNA, 22 nt, synthetic construct
  source 1..22: mol_type = other RNA
gcactgcgcctccaagcggtta

SEQ ID NO: 7146 - RNA, 22 nt, synthetic construct
  source 1..22: mol_type = other RNA
gcagaggtagaaagccccgatg

SEQ ID NO: 7147 - RNA, 22 nt, synthetic construct
  source 1..22: mol_type = other RNA
gcagcagcgcggggtccgtgcg

SEQ ID NO: 7148 - RNA, 22 nt, synthetic construct
  source 1..22: mol_type = other RNA
gcagccgaagcagctcgtcctc

SEQ ID NO: 7149 - RNA, 22 nt, synthetic construct
  source 1..22: mol_type = other RNA
gcagccgagtggctcttcccgc

SEQ ID NO: 7150 - RNA, 22 nt, synthetic construct
  source 1..22: mol_type = other RNA
gcagcctcggcgcagaggtaga

SEQ ID NO: 7151 - RNA, 22 nt, synthetic construct
  source 1..22: mol_type = other RNA
gcagcgacgcatggtagagaag

SEQ ID NO: 7152 - RNA, 22 nt, synthetic construct
  source 1..22: mol_type = other RNA
gcagcgcctcgtgccgttgctc

SEQ ID NO: 7153 - RNA, 22 nt, synthetic construct
  source 1..22: mol_type = other RNA
gcagcgcgcagttgcccagcgc

SEQ ID NO: 7154 - RNA, 22 nt, synthetic construct
  source 1..22: mol_type = other RNA
gcagcgcggggtccgtgcggcg

SEQ ID NO: 7155 - RNA, 22 nt, synthetic construct
  source 1..22: mol_type = other RNA
gcagctcgtcctccttggagaa

SEQ ID NO: 7156 - RNA, 22 nt, synthetic construct
  source 1..22: mol_type = other RNA
gcaggcatcttggagcacatgt

SEQ ID NO: 7157 - RNA, 22 nt, synthetic construct
  source 1..22: mol_type = other RNA
gcaggcgtgcagccgaagcagc

SEQ ID NO: 7158 - RNA, 22 nt, synthetic construct
  source 1..22: mol_type = other RNA
gcaggctcttgatggcagcctc

SEQ ID NO: 7159 - RNA, 22 nt, synthetic construct
  source 1..22: mol_type = other RNA
gcaggtcgtcgggcccgcggcc

SEQ ID NO: 7160 - RNA, 22 nt, synthetic construct
  source 1..22: mol_type = other RNA
gcagtagcggtgttggcgacta

SEQ ID NO: 7161 - RNA, 22 nt, synthetic construct
  source 1..22: mol_type = other RNA
gcagtgcatcggggctttctac

SEQ ID NO: 7162 - RNA, 22 nt, synthetic construct
  source 1..22: mol_type = other RNA
gcagtggcgcagcagcgcgggg

SEQ ID NO: 7163 - RNA, 22 nt, synthetic construct
  source 1..22: mol_type = other RNA
gcagttgcccagcgccagcgcg

SEQ ID NO: 7164 - RNA, 22 nt, synthetic construct
  source 1..22: mol_type = other RNA
gcatcggggctttctacctctg

SEQ ID NO: 7165 - RNA, 22 nt, synthetic construct
  source 1..22: mol_type = other RNA
gcatcttggagcacatgttcaa

SEQ ID NO: 7166 - RNA, 22 nt, synthetic construct
  source 1..22: mol_type = other RNA
gcatggtagagaagcgcgcagc

SEQ ID NO: 7167 - RNA, 22 nt, synthetic construct
  source 1..22: mol_type = other RNA
gcatgtctcctccgaatgcttg

SEQ ID NO: 7168 - RNA, 22 nt, synthetic construct
  source 1..22: mol_type = other RNA
gcattcggaggagacatgccag

SEQ ID NO: 7169 - RNA, 22 nt, synthetic construct
  source 1..22: mol_type = other RNA
gcattgggctgggcgtgatcct

SEQ ID NO: 7170 - RNA, 22 nt, synthetic construct
  source 1..22: mol_type = other RNA
gccaacaccgctactgcgaggc

SEQ ID NO: 7171 - RNA, 22 nt, synthetic construct
  source 1..22: mol_type = other RNA
gccacaagcggctccacgagcg

SEQ ID NO: 7172 - RNA, 22 nt, synthetic construct
  source 1..22: mol_type = other RNA
gccaccagcctctggcatgtct

SEQ ID NO: 7173 - RNA, 22 nt, synthetic construct
  source 1..22: mol_type = other RNA
gccacgctccgcgccagctcta

SEQ ID NO: 7174 - RNA, 22 nt, synthetic construct
  source 1..22: mol_type = other RNA
gccactcggctgcgcgcttctc

SEQ ID NO: 7175 - RNA, 22 nt, synthetic construct
  source 1..22: mol_type = other RNA
gccactgcgcgctggcgctggg

SEQ ID NO: 7176 - RNA, 22 nt, synthetic construct
  source 1..22: mol_type = other RNA
gccagaggctggtggcggccgg

SEQ ID NO: 7177 - RNA, 22 nt, synthetic construct
  source 1..22: mol_type = other RNA
gccagcgacacaagccagggcc

SEQ ID NO: 7178 - RNA, 22 nt, synthetic construct
  source 1..22: mol_type = other RNA
gccagcgcgcagtggcgcagca

SEQ ID NO: 7179 - RNA, 22 nt, synthetic construct
  source 1..22: mol_type = other RNA
gccagcgtgcccgagcgctcca

SEQ ID NO: 7180 - RNA, 22 nt, synthetic construct
  source 1..22: mol_type = other RNA
gccagctctacgggttcgcgtt

SEQ ID NO: 7181 - RNA, 22 nt, synthetic construct
  source 1..22: mol_type = other RNA
gccaggcggtgcagcgacgcat

SEQ ID NO: 7182 - RNA, 22 nt, synthetic construct
  source 1..22: mol_type = other RNA
gccagggccgcgggcccgacga

SEQ ID NO: 7183 - RNA, 22 nt, synthetic construct
  source 1..22: mol_type = other RNA
gccagggtccagcgaggccaca

SEQ ID NO: 7184 - RNA, 22 nt, synthetic construct
  source 1..22: mol_type = other RNA
gccaggttcaggatcacgccca

SEQ ID NO: 7185 - RNA, 22 nt, synthetic construct
  source 1..22: mol_type = other RNA
gccatcaagagcctgcaaggca

SEQ ID NO: 7186 - RNA, 22 nt, synthetic construct
  source 1..22: mol_type = other RNA
gcccagcgccagcgcgcagtgg

SEQ ID NO: 7187 - RNA, 22 nt, synthetic construct
  source 1..22: mol_type = other RNA
gcccccgtgcagcgcgcagttg

SEQ ID NO: 7188 - RNA, 22 nt, synthetic construct
  source 1..22: mol_type = other RNA
gccccgatgcactgcgcctcca

SEQ ID NO: 7189 - RNA, 22 nt, synthetic construct
  source 1..22: mol_type = other RNA
gcccgacgacctgcagcgcctc

SEQ ID NO: 7190 - RNA, 22 nt, synthetic construct
  source 1..22: mol_type = other RNA
gcccgagcgctccacctcgcgc

SEQ ID NO: 7191 - RNA, 22 nt, synthetic construct
  source 1..22: mol_type = other RNA
gcccgcggccctggcttgtgtc

SEQ ID NO: 7192 - RNA, 22 nt, synthetic construct
  source 1..22: mol_type = other RNA
gcccgctgtctggtggacgcca

SEQ ID NO: 7193 - RNA, 22 nt, synthetic construct
  source 1..22: mol_type = other RNA
gccctggcttgtgtcgctggcg

SEQ ID NO: 7194 - RNA, 22 nt, synthetic construct
  source 1..22: mol_type = other RNA
gccgaagcagctcgtcctcctt

SEQ ID NO: 7195 - RNA, 22 nt, synthetic construct
  source 1..22: mol_type = other RNA
gccgaggctgccatcaagagcc

SEQ ID NO: 7196 - RNA, 22 nt, synthetic construct
  source 1..22: mol_type = other RNA
gccgagtggctcttcccgctcg

SEQ ID NO: 7197 - RNA, 22 nt, synthetic construct
  source 1..22: mol_type = other RNA
gccgcacggaccccgcgctgct

SEQ ID NO: 7198 - RNA, 22 nt, synthetic construct
  source 1..22: mol_type = other RNA
gccgccaccagcctctggcatg

SEQ ID NO: 7199 - RNA, 22 nt, synthetic construct
  source 1..22: mol_type = other RNA
gccgccgcacggaccccgcgct

SEQ ID NO: 7200 - RNA, 22 nt, synthetic construct
  source 1..22: mol_type = other RNA
gccgccggccgccaccagcctc

SEQ ID NO: 7201 - RNA, 22 nt, synthetic construct
  source 1..22: mol_type = other RNA
gccgcgggcccgacgacctgca

SEQ ID NO: 7202 - RNA, 22 nt, synthetic construct
  source 1..22: mol_type = other RNA
gccgcttcgcccgctgtctggt

SEQ ID NO: 7203 - RNA, 22 nt, synthetic construct
  source 1..22: mol_type = other RNA
gccgcttgtggcctcgctggac

SEQ ID NO: 7204 - RNA, 22 nt, synthetic construct
  source 1..22: mol_type = other RNA
gccggccgccaccagcctctgg

SEQ ID NO: 7205 - RNA, 22 nt, synthetic construct
  source 1..22: mol_type = other RNA
gccggcggcctggacgcggtgc

SEQ ID NO: 7206 - RNA, 22 nt, synthetic construct
  source 1..22: mol_type = other RNA
gccgttgctcgactctaaccgc

SEQ ID NO: 7207 - RNA, 22 nt, synthetic construct
  source 1..22: mol_type = other RNA
gcctccaagcggttagagtcga

SEQ ID NO: 7208 - RNA, 22 nt, synthetic construct
  source 1..22: mol_type = other RNA
gcctcgcagtagcggtgttggc

SEQ ID NO: 7209 - RNA, 22 nt, synthetic construct
  source 1..22: mol_type = other RNA
gcctcgctggaccctggccgct

SEQ ID NO: 7210 - RNA, 22 nt, synthetic construct
  source 1..22: mol_type = other RNA
gcctcggcgcagaggtagaaag

SEQ ID NO: 7211 - RNA, 22 nt, synthetic construct
  source 1..22: mol_type = other RNA
gcctcgtgccgttgctcgactc

SEQ ID NO: 7212 - RNA, 22 nt, synthetic construct
  source 1..22: mol_type = other RNA
gcctctggcatgtctcctccga

SEQ ID NO: 7213 - RNA, 22 nt, synthetic construct
  source 1..22: mol_type = other RNA
gcctgcaaggcaagaccaaggt

SEQ ID NO: 7214 - RNA, 22 nt, synthetic construct
  source 1..22: mol_type = other RNA
gcctgccacgctccgcgccagc

SEQ ID NO: 7215 - RNA, 22 nt, synthetic construct
  source 1..22: mol_type = other RNA
gcctgcctcgcagtagcggtgt

SEQ ID NO: 7216 - RNA, 22 nt, synthetic construct
  source 1..22: mol_type = other RNA
gcctggacgcggtgctgtattg

SEQ ID NO: 7217 - RNA, 22 nt, synthetic construct
  source 1..22: mol_type = other RNA
gcctggcccccgtgcagcgcgc

SEQ ID NO: 7218 - RNA, 22 nt, synthetic construct
  source 1..22: mol_type = other RNA
gccttctccaaggaggacgagc

SEQ ID NO: 7219 - RNA, 22 nt, synthetic construct
  source 1..22: mol_type = other RNA
gccttgcaggctcttgatggca

SEQ ID NO: 7220 - RNA, 22 nt, synthetic construct
  source 1..22: mol_type = other RNA
gcgaacccgtagagctggcgcg

SEQ ID NO: 7221 - RNA, 22 nt, synthetic construct
  source 1..22: mol_type = other RNA
gcgaagcggccagggtccagcg

SEQ ID NO: 7222 - RNA, 22 nt, synthetic construct
  source 1..22: mol_type = other RNA
gcgaaggaacgcgaacccgtag

SEQ ID NO: 7223 - RNA, 22 nt, synthetic construct
  source 1..22: mol_type = other RNA
gcgacacaagccagggccgcgg

SEQ ID NO: 7224 - RNA, 22 nt, synthetic construct
  source 1..22: mol_type = other RNA
gcgacgcatggtagagaagcgc

SEQ ID NO: 7225 - RNA, 22 nt, synthetic construct
  source 1..22: mol_type = other RNA
gcgactaacaaggaggtggagc

SEQ ID NO: 7226 - RNA, 22 nt, synthetic construct
  source 1..22: mol_type = other RNA
gcgagcgggaagagccactcgg

SEQ ID NO: 7227 - RNA, 22 nt, synthetic construct
  source 1..22: mol_type = other RNA
gcgaggcaggcgtgcagccgaa

SEQ ID NO: 7228 - RNA, 22 nt, synthetic construct
  source 1..22: mol_type = other RNA
gcgaggccacaagcggctccac

SEQ ID NO: 7229 - RNA, 22 nt, synthetic construct
  source 1..22: mol_type = other RNA
gcgaggtggagcgctcgggcac

SEQ ID NO: 7230 - RNA, 22 nt, synthetic construct
  source 1..22: mol_type = other RNA
gcgcagaggtagaaagccccga

SEQ ID NO: 7231 - RNA, 22 nt, synthetic construct
  source 1..22: mol_type = other RNA
gcgcagcagcgcggggtccgtg

SEQ ID NO: 7232 - RNA, 22 nt, synthetic construct
  source 1..22: mol_type = other RNA
gcgcagccgagtggctcttccc

SEQ ID NO: 7233 - RNA, 22 nt, synthetic construct
  source 1..22: mol_type = other RNA
gcgcagtgcatcggggctttct

SEQ ID NO: 7234 - RNA, 22 nt, synthetic construct
  source 1..22: mol_type = other RNA
gcgcagtggcgcagcagcgcgg

SEQ ID NO: 7235 - RNA, 22 nt, synthetic construct
  source 1..22: mol_type = other RNA
gcgcagttgcccagcgccagcg

SEQ ID NO: 7236 - RNA, 22 nt, synthetic construct
  source 1..22: mol_type = other RNA
gcgcattgggctgggcgtgatc

SEQ ID NO: 7237 - RNA, 22 nt, synthetic construct
  source 1..22: mol_type = other RNA
gcgccactgcgcgctggcgctg

SEQ ID NO: 7238 - RNA, 22 nt, synthetic construct
  source 1..22: mol_type = other RNA
gcgccagcgcgcagtggcgcag

SEQ ID NO: 7239 - RNA, 22 nt, synthetic construct
  source 1..22: mol_type = other RNA
gcgccagcgtgcccgagcgctc

SEQ ID NO: 7240 - RNA, 22 nt, synthetic construct
  source 1..22: mol_type = other RNA
gcgccagctctacgggttcgcg

SEQ ID NO: 7241 - RNA, 22 nt, synthetic construct
  source 1..22: mol_type = other RNA
gcgccgaggctgccatcaagag

SEQ ID NO: 7242 - RNA, 22 nt, synthetic construct
  source 1..22: mol_type = other RNA
gcgcctccaagcggttagagtc

SEQ ID NO: 7243 - RNA, 22 nt, synthetic construct
  source 1..22: mol_type = other RNA
gcgcctcgtgccgttgctcgac

SEQ ID NO: 7244 - RNA, 22 nt, synthetic construct
  source 1..22: mol_type = other RNA
gcgcgaggtggagcgctcgggc

SEQ ID NO: 7245 - RNA, 22 nt, synthetic construct
  source 1..22: mol_type = other RNA
gcgcgcagccgagtggctcttc

SEQ ID NO: 7246 - RNA, 22 nt, synthetic construct
  source 1..22: mol_type = other RNA
gcgcgcagtggcgcagcagcgc

SEQ ID NO: 7247 - RNA, 22 nt, synthetic construct
  source 1..22: mol_type = other RNA
gcgcgcagttgcccagcgccag

SEQ ID NO: 7248 - RNA, 22 nt, synthetic construct
  source 1..22: mol_type = other RNA
gcgcgcattgggctgggcgtga

SEQ ID NO: 7249 - RNA, 22 nt, synthetic construct
  source 1..22: mol_type = other RNA
gcgcgctgcacgggggccaggc

SEQ ID NO: 7250 - RNA, 22 nt, synthetic construct
  source 1..22: mol_type = other RNA
gcgcgctggcgctgggcaactg

SEQ ID NO: 7251 - RNA, 22 nt, synthetic construct
  source 1..22: mol_type = other RNA
gcgcgcttctctaccatgcgtc

SEQ ID NO: 7252 - RNA, 22 nt, synthetic construct
  source 1..22: mol_type = other RNA
gcgcggagcgtggcaggcatct

SEQ ID NO: 7253 - RNA, 22 nt, synthetic construct
  source 1..22: mol_type = other RNA
gcgcggggtccgtgcggcggca

SEQ ID NO: 7254 - RNA, 22 nt, synthetic construct
  source 1..22: mol_type = other RNA
gcgctccacctccttgttagtc

SEQ ID NO: 7255 - RNA, 22 nt, synthetic construct
  source 1..22: mol_type = other RNA
gcgctccacctcgcgctccacc

SEQ ID NO: 7256 - RNA, 22 nt, synthetic construct
  source 1..22: mol_type = other RNA
gcgctcgggcacgctggcgctc

SEQ ID NO: 7257 - RNA, 22 nt, synthetic construct
  source 1..22: mol_type = other RNA
gcgctcgtggagccgcttgtgg

SEQ ID NO: 7258 - RNA, 22 nt, synthetic construct
  source 1..22: mol_type = other RNA
gcgctgcacgggggccaggcgg

SEQ ID NO: 7259 - RNA, 22 nt, synthetic construct
  source 1..22: mol_type = other RNA
gcgctgcaggtcgtcgggcccg

SEQ ID NO: 7260 - RNA, 22 nt, synthetic construct
  source 1..22: mol_type = other RNA
gcgctgctgcgccactgcgcgc

SEQ ID NO: 7261 - RNA, 22 nt, synthetic construct
  source 1..22: mol_type = other RNA
gcgctggcgctgggcaactgcg

SEQ ID NO: 7262 - RNA, 22 nt, synthetic construct
  source 1..22: mol_type = other RNA
gcgctgggcaactgcgcgctgc

SEQ ID NO: 7263 - RNA, 22 nt, synthetic construct
  source 1..22: mol_type = other RNA
gcgcttctctaccatgcgtcgc

SEQ ID NO: 7264 - RNA, 22 nt, synthetic construct
  source 1..22: mol_type = other RNA
gcggagcgtggcaggcatcttg

SEQ ID NO: 7265 - RNA, 22 nt, synthetic construct
  source 1..22: mol_type = other RNA
gcggcaccaatacagcaccgcg

SEQ ID NO: 7266 - RNA, 22 nt, synthetic construct
  source 1..22: mol_type = other RNA
gcggccagggtccagcgaggcc

SEQ ID NO: 7267 - RNA, 22 nt, synthetic construct
  source 1..22: mol_type = other RNA
gcggccctggcttgtgtcgctg

SEQ ID NO: 7268 - RNA, 22 nt, synthetic construct
  source 1..22: mol_type = other RNA
gcggccggcggcctggacgcgg

SEQ ID NO: 7269 - RNA, 22 nt, synthetic construct
  source 1..22: mol_type = other RNA
gcggcctggacgcggtgctgta

SEQ ID NO: 7270 - RNA, 22 nt, synthetic construct
  source 1..22: mol_type = other RNA
gcggcggcaccaatacagcacc

SEQ ID NO: 7271 - RNA, 22 nt, synthetic construct
  source 1..22: mol_type = other RNA
gcggctccacgagcgccagcgt

SEQ ID NO: 7272 - RNA, 22 nt, synthetic construct
  source 1..22: mol_type = other RNA
gcgggaagagccactcggctgc

SEQ ID NO: 7273 - RNA, 22 nt, synthetic construct
  source 1..22: mol_type = other RNA
gcgggcccgacgacctgcagcg

SEQ ID NO: 7274 - RNA, 22 nt, synthetic construct
  source 1..22: mol_type = other RNA
gcgggcgaagcggccagggtcc

SEQ ID NO: 7275 - RNA, 22 nt, synthetic construct
  source 1..22: mol_type = other RNA
gcggggtccgtgcggcggcacc

SEQ ID NO: 7276 - RNA, 22 nt, synthetic construct
  source 1..22: mol_type = other RNA
gcggtgcagcgacgcatggtag

SEQ ID NO: 7277 - RNA, 22 nt, synthetic construct
  source 1..22: mol_type = other RNA
gcggtgctgtattggtgccgcc

SEQ ID NO: 7278 - RNA, 22 nt, synthetic construct
  source 1..22: mol_type = other RNA
gcggtgttggcgactaacaagg

SEQ ID NO: 7279 - RNA, 22 nt, synthetic construct
  source 1..22: mol_type = other RNA
gcggttagagtcgagcaacggc

SEQ ID NO: 7280 - RNA, 22 nt, synthetic construct
  source 1..22: mol_type = other RNA
gcgtccaccagacagcgggcga

SEQ ID NO: 7281 - RNA, 22 nt, synthetic construct
  source 1..22: mol_type = other RNA
gcgtccaggccgccggccgcca

SEQ ID NO: 7282 - RNA, 22 nt, synthetic construct
  source 1..22: mol_type = other RNA
gcgtcgctgcaccgcctggccc

SEQ ID NO: 7283 - RNA, 22 nt, synthetic construct
  source 1..22: mol_type = other RNA
gcgtgatcctgaacctggcgaa

SEQ ID NO: 7284 - RNA, 22 nt, synthetic construct
  source 1..22: mol_type = other RNA
gcgtgcagccgaagcagctcgt

SEQ ID NO: 7285 - RNA, 22 nt, synthetic construct
  source 1..22: mol_type = other RNA
gcgtgcccgagcgctccacctc

SEQ ID NO: 7286 - RNA, 22 nt, synthetic construct
  source 1..22: mol_type = other RNA
gcgtggcaggcatcttggagca

SEQ ID NO: 7287 - RNA, 22 nt, synthetic construct
  source 1..22: mol_type = other RNA
gcgtggcgcgcattgggctggg

SEQ ID NO: 7288 - RNA, 22 nt, synthetic construct
  source 1..22: mol_type = other RNA
gcgttccttcgccaggttcagg

SEQ ID NO: 7289 - RNA, 22 nt, synthetic construct
  source 1..22: mol_type = other RNA
gctactgcgaggcaggcgtgca

SEQ ID NO: 7290 - RNA, 22 nt, synthetic construct
  source 1..22: mol_type = other RNA
gctccaagatgcctgccacgct

SEQ ID NO: 7291 - RNA, 22 nt, synthetic construct
  source 1..22: mol_type = other RNA
gctccacctccttgttagtcgc

SEQ ID NO: 7292 - RNA, 22 nt, synthetic construct
  source 1..22: mol_type = other RNA
gctccacctcgcgctccacctc

SEQ ID NO: 7293 - RNA, 22 nt, synthetic construct
  source 1..22: mol_type = other RNA
gctccacgagcgccagcgtgcc

SEQ ID NO: 7294 - RNA, 22 nt, synthetic construct
  source 1..22: mol_type = other RNA
gctccgcgccagctctacgggt

SEQ ID NO: 7295 - RNA, 22 nt, synthetic construct
  source 1..22: mol_type = other RNA
gctcgactctaaccgcttggag

SEQ ID NO: 7296 - RNA, 22 nt, synthetic construct
  source 1..22: mol_type = other RNA
gctcgccttctccaaggaggac

SEQ ID NO: 7297 - RNA, 22 nt, synthetic construct
  source 1..22: mol_type = other RNA
gctcgggcacgctggcgctcgt

SEQ ID NO: 7298 - RNA, 22 nt, synthetic construct
  source 1..22: mol_type = other RNA
gctcgtcctccttggagaaggc

SEQ ID NO: 7299 - RNA, 22 nt, synthetic construct
  source 1..22: mol_type = other RNA
gctcgtggagccgcttgtggcc

SEQ ID NO: 7300 - RNA, 22 nt, synthetic construct
  source 1..22: mol_type = other RNA
gctctacgggttcgcgttcctt

SEQ ID NO: 7301 - RNA, 22 nt, synthetic construct
  source 1..22: mol_type = other RNA
gctcttcccgctcgccttctcc

SEQ ID NO: 7302 - RNA, 22 nt, synthetic construct
  source 1..22: mol_type = other RNA
gctcttgatggcagcctcggcg

SEQ ID NO: 7303 - RNA, 22 nt, synthetic construct
  source 1..22: mol_type = other RNA
gctgcaccgcctggcccccgtg

SEQ ID NO: 7304 - RNA, 22 nt, synthetic construct
  source 1..22: mol_type = other RNA
gctgcacgcctgcctcgcagta

SEQ ID NO: 7305 - RNA, 22 nt, synthetic construct
  source 1..22: mol_type = other RNA
gctgcacgggggccaggcggtg

SEQ ID NO: 7306 - RNA, 22 nt, synthetic construct
  source 1..22: mol_type = other RNA
gctgcaggtcgtcgggcccgcg

SEQ ID NO: 7307 - RNA, 22 nt, synthetic construct
  source 1..22: mol_type = other RNA
gctgccatcaagagcctgcaag

SEQ ID NO: 7308 - RNA, 22 nt, synthetic construct
  source 1..22: mol_type = other RNA
gctgcgccactgcgcgctggcg

SEQ ID NO: 7309 - RNA, 22 nt, synthetic construct
  source 1..22: mol_type = other RNA
gctgcgcgcttctctaccatgc

SEQ ID NO: 7310 - RNA, 22 nt, synthetic construct
  source 1..22: mol_type = other RNA
gctgctgcgccactgcgcgctg

SEQ ID NO: 7311 - RNA, 22 nt, synthetic construct
  source 1..22: mol_type = other RNA
gctgcttcggctgcacgcctgc

SEQ ID NO: 7312 - RNA, 22 nt, synthetic construct
  source 1..22: mol_type = other RNA
gctggaccctggccgcttcgcc

SEQ ID NO: 7313 - RNA, 22 nt, synthetic construct
  source 1..22: mol_type = other RNA
gctggcgcggagcgtggcaggc

SEQ ID NO: 7314 - RNA, 22 nt, synthetic construct
  source 1..22: mol_type = other RNA
gctggcgctcgtggagccgctt

SEQ ID NO: 7315 - RNA, 22 nt, synthetic construct
  source 1..22: mol_type = other RNA
gctggcgctgggcaactgcgcg

SEQ ID NO: 7316 - RNA, 22 nt, synthetic construct
  source 1..22: mol_type = other RNA
gctggcgtccaccagacagcgg

SEQ ID NO: 7317 - RNA, 22 nt, synthetic construct
  source 1..22: mol_type = other RNA
gctgggcaactgcgcgctgcac

SEQ ID NO: 7318 - RNA, 22 nt, synthetic construct
  source 1..22: mol_type = other RNA
gctgggcgtgatcctgaacctg

SEQ ID NO: 7319 - RNA, 22 nt, synthetic construct
  source 1..22: mol_type = other RNA
gctggtggcggccggcggcctg

SEQ ID NO: 7320 - RNA, 22 nt, synthetic construct
  source 1..22: mol_type = other RNA
gctgtattggtgccgccgcacg

SEQ ID NO: 7321 - RNA, 22 nt, synthetic construct
  source 1..22: mol_type = other RNA
gctgtctggtggacgccagcga

SEQ ID NO: 7322 - RNA, 22 nt, synthetic construct
  source 1..22: mol_type = other RNA
gcttcgcccgctgtctggtgga

SEQ ID NO: 7323 - RNA, 22 nt, synthetic construct
  source 1..22: mol_type = other RNA
gcttcggctgcacgcctgcctc

SEQ ID NO: 7324 - RNA, 22 nt, synthetic construct
  source 1..22: mol_type = other RNA
gcttctctaccatgcgtcgctg

SEQ ID NO: 7325 - RNA, 22 nt, synthetic construct
  source 1..22: mol_type = other RNA
gcttgaacatgtgctccaagat

SEQ ID NO: 7326 - RNA, 22 nt, synthetic construct
  source 1..22: mol_type = other RNA
gcttggaggcgcagtgcatcgg

SEQ ID NO: 7327 - RNA, 22 nt, synthetic construct
  source 1..22: mol_type = other RNA
gcttgtggcctcgctggaccct

SEQ ID NO: 7328 - RNA, 22 nt, synthetic construct
  source 1..22: mol_type = other RNA
gcttgtgtcgctggcgtccacc

SEQ ID NO: 7329 - RNA, 22 nt, synthetic construct
  source 1..22: mol_type = other RNA
gctttctacctctgcgccgagg

SEQ ID NO: 7330 - RNA, 22 nt, synthetic construct
  source 1..22: mol_type = other RNA
ggaacgcgaacccgtagagctg

SEQ ID NO: 7331 - RNA, 22 nt, synthetic construct
  source 1..22: mol_type = other RNA
ggaagagccactcggctgcgcg

SEQ ID NO: 7332 - RNA, 22 nt, synthetic construct
  source 1..22: mol_type = other RNA
ggaccccgcgctgctgcgccac

SEQ ID NO: 7333 - RNA, 22 nt, synthetic construct
  source 1..22: mol_type = other RNA
ggaccctggccgcttcgcccgc

SEQ ID NO: 7334 - RNA, 22 nt, synthetic construct
  source 1..22: mol_type = other RNA
ggacgagctgcttcggctgcac

SEQ ID NO: 7335 - RNA, 22 nt, synthetic construct
  source 1..22: mol_type = other RNA
ggacgccagcgacacaagccag

SEQ ID NO: 7336 - RNA, 22 nt, synthetic construct
  source 1..22: mol_type = other RNA
ggacgcggtgctgtattggtgc

SEQ ID NO: 7337 - RNA, 22 nt, synthetic construct
  source 1..22: mol_type = other RNA
ggagaaggcgagcgggaagagc

SEQ ID NO: 7338 - RNA, 22 nt, synthetic construct
  source 1..22: mol_type = other RNA
ggagacatgccagaggctggtg

SEQ ID NO: 7339 - RNA, 22 nt, synthetic construct
  source 1..22: mol_type = other RNA
ggagcacatgttcaagcattcg

SEQ ID NO: 7340 - RNA, 22 nt, synthetic construct
  source 1..22: mol_type = other RNA
ggagccgcttgtggcctcgctg

SEQ ID NO: 7341 - RNA, 22 nt, synthetic construct
  source 1..22: mol_type = other RNA
ggagcgcgaggtggagcgctcg

SEQ ID NO: 7342 - RNA, 22 nt, synthetic construct
  source 1..22: mol_type = other RNA
ggagcgctcgggcacgctggcg

SEQ ID NO: 7343 - RNA, 22 nt, synthetic construct
  source 1..22: mol_type = other RNA
ggagcgtggcaggcatcttgga

SEQ ID NO: 7344 - RNA, 22 nt, synthetic construct
  source 1..22: mol_type = other RNA
ggaggacgagctgcttcggctg

SEQ ID NO: 7345 - RNA, 22 nt, synthetic construct
  source 1..22: mol_type = other RNA
ggaggagacatgccagaggctg

SEQ ID NO: 7346 - RNA, 22 nt, synthetic construct
  source 1..22: mol_type = other RNA
ggaggcgcagtgcatcggggct

SEQ ID NO: 7347 - RNA, 22 nt, synthetic construct
  source 1..22: mol_type = other RNA
ggaggtggagcgcgaggtggag

SEQ ID NO: 7348 - RNA, 22 nt, synthetic construct
  source 1..22: mol_type = other RNA
ggatcacgcccagcccaatgcg

SEQ ID NO: 7349 - RNA, 22 nt, synthetic construct
  source 1..22: mol_type = other RNA
ggcaactgcgcgctgcacgggg

SEQ ID NO: 7350 - RNA, 22 nt, synthetic construct
  source 1..22: mol_type = other RNA
ggcaagaccaaggtgggtgcag

SEQ ID NO: 7351 - RNA, 22 nt, synthetic construct
  source 1..22: mol_type = other RNA
ggcaccaatacagcaccgcgtc

SEQ ID NO: 7352 - RNA, 22 nt, synthetic construct
  source 1..22: mol_type = other RNA
ggcacgaggcgctgcaggtcgt

SEQ ID NO: 7353 - RNA, 22 nt, synthetic construct
  source 1..22: mol_type = other RNA
ggcacgctggcgctcgtggagc

SEQ ID NO: 7354 - RNA, 22 nt, synthetic construct
  source 1..22: mol_type = other RNA
ggcagcctcggcgcagaggtag

SEQ ID NO: 7355 - RNA, 22 nt, synthetic construct
  source 1..22: mol_type = other RNA
ggcaggcatcttggagcacatg

SEQ ID NO: 7356 - RNA, 22 nt, synthetic construct
  source 1..22: mol_type = other RNA
ggcaggcgtgcagccgaagcag

SEQ ID NO: 7357 - RNA, 22 nt, synthetic construct
  source 1..22: mol_type = other RNA
ggcatcttggagcacatgttca

SEQ ID NO: 7358 - RNA, 22 nt, synthetic construct
  source 1..22: mol_type = other RNA
ggcatgtctcctccgaatgctt

SEQ ID NO: 7359 - RNA, 22 nt, synthetic construct
  source 1..22: mol_type = other RNA
ggccacaagcggctccacgagc

SEQ ID NO: 7360 - RNA, 22 nt, synthetic construct
  source 1..22: mol_type = other RNA
ggccaggcggtgcagcgacgca

SEQ ID NO: 7361 - RNA, 22 nt, synthetic construct
  source 1..22: mol_type = other RNA
ggccagggtccagcgaggccac

SEQ ID NO: 7362 - RNA, 22 nt, synthetic construct
  source 1..22: mol_type = other RNA
ggcccccgtgcagcgcgcagtt

SEQ ID NO: 7363 - RNA, 22 nt, synthetic construct
  source 1..22: mol_type = other RNA
ggcccgacgacctgcagcgcct

SEQ ID NO: 7364 - RNA, 22 nt, synthetic construct
  source 1..22: mol_type = other RNA
ggcccgcggccctggcttgtgt

SEQ ID NO: 7365 - RNA, 22 nt, synthetic construct
  source 1..22: mol_type = other RNA
ggccctggcttgtgtcgctggc

SEQ ID NO: 7366 - RNA, 22 nt, synthetic construct
  source 1..22: mol_type = other RNA
ggccgccaccagcctctggcat

SEQ ID NO: 7367 - RNA, 22 nt, synthetic construct
  source 1..22: mol_type = other RNA
ggccgccggccgccaccagcct

SEQ ID NO: 7368 - RNA, 22 nt, synthetic construct
  source 1..22: mol_type = other RNA
ggccgcgggcccgacgacctgc

SEQ ID NO: 7369 - RNA, 22 nt, synthetic construct
  source 1..22: mol_type = other RNA
ggccgcttcgcccgctgtctgg

SEQ ID NO: 7370 - RNA, 22 nt, synthetic construct
  source 1..22: mol_type = other RNA
ggccggcggcctggacgcggtg

SEQ ID NO: 7371 - RNA, 22 nt, synthetic construct
  source 1..22: mol_type = other RNA
ggcctcgctggaccctggccgc

SEQ ID NO: 7372 - RNA, 22 nt, synthetic construct
  source 1..22: mol_type = other RNA
ggcctggacgcggtgctgtatt

SEQ ID NO: 7373 - RNA, 22 nt, synthetic construct
  source 1..22: mol_type = other RNA
ggcgaagcggccagggtccagc

SEQ ID NO: 7374 - RNA, 22 nt, synthetic construct
  source 1..22: mol_type = other RNA
ggcgaaggaacgcgaacccgta

SEQ ID NO: 7375 - RNA, 22 nt, synthetic construct
  source 1..22: mol_type = other RNA
ggcgactaacaaggaggtggag

SEQ ID NO: 7376 - RNA, 22 nt, synthetic construct
  source 1..22: mol_type = other RNA
ggcgagcgggaagagccactcg

SEQ ID NO: 7377 - RNA, 22 nt, synthetic construct
  source 1..22: mol_type = other RNA
ggcgcagaggtagaaagccccg

SEQ ID NO: 7378 - RNA, 22 nt, synthetic construct
  source 1..22: mol_type = other RNA
ggcgcagcagcgcggggtccgt

SEQ ID NO: 7379 - RNA, 22 nt, synthetic construct
  source 1..22: mol_type = other RNA
ggcgcagtgcatcggggctttc

SEQ ID NO: 7380 - RNA, 22 nt, synthetic construct
  source 1..22: mol_type = other RNA
ggcgcgcattgggctgggcgtg

SEQ ID NO: 7381 - RNA, 22 nt, synthetic construct
  source 1..22: mol_type = other RNA
ggcgcggagcgtggcaggcatc

SEQ ID NO: 7382 - RNA, 22 nt, synthetic construct
  source 1..22: mol_type = other RNA
ggcgctcgtggagccgcttgtg

SEQ ID NO: 7383 - RNA, 22 nt, synthetic construct
  source 1..22: mol_type = other RNA
ggcgctgcaggtcgtcgggccc

SEQ ID NO: 7384 - RNA, 22 nt, synthetic construct
  source 1..22: mol_type = other RNA
ggcgctgggcaactgcgcgctg

SEQ ID NO: 7385 - RNA, 22 nt, synthetic construct
  source 1..22: mol_type = other RNA
ggcggcaccaatacagcaccgc

SEQ ID NO: 7386 - RNA, 22 nt, synthetic construct
  source 1..22: mol_type = other RNA
ggcggccggcggcctggacgcg

SEQ ID NO: 7387 - RNA, 22 nt, synthetic construct
  source 1..22: mol_type = other RNA
ggcggcctggacgcggtgctgt

SEQ ID NO: 7388 - RNA, 22 nt, synthetic construct
  source 1..22: mol_type = other RNA
ggcggtgcagcgacgcatggta

SEQ ID NO: 7389 - RNA, 22 nt, synthetic construct
  source 1..22: mol_type = other RNA
ggcgtccaccagacagcgggcg

SEQ ID NO: 7390 - RNA, 22 nt, synthetic construct
  source 1..22: mol_type = other RNA
ggcgtgatcctgaacctggcga

SEQ ID NO: 7391 - RNA, 22 nt, synthetic construct
  source 1..22: mol_type = other RNA
ggcgtgcagccgaagcagctcg

SEQ ID NO: 7392 - RNA, 22 nt, synthetic construct
  source 1..22: mol_type = other RNA
ggctccacgagcgccagcgtgc

SEQ ID NO: 7393 - RNA, 22 nt, synthetic construct
  source 1..22: mol_type = other RNA
ggctcttcccgctcgccttctc

SEQ ID NO: 7394 - RNA, 22 nt, synthetic construct
  source 1..22: mol_type = other RNA
ggctcttgatggcagcctcggc

SEQ ID NO: 7395 - RNA, 22 nt, synthetic construct
  source 1..22: mol_type = other RNA
ggctgcacgcctgcctcgcagt

SEQ ID NO: 7396 - RNA, 22 nt, synthetic construct
  source 1..22: mol_type = other RNA
ggctgccatcaagagcctgcaa

SEQ ID NO: 7397 - RNA, 22 nt, synthetic construct
  source 1..22: mol_type = other RNA
ggctgcgcgcttctctaccatg

SEQ ID NO: 7398 - RNA, 22 nt, synthetic construct
  source 1..22: mol_type = other RNA
ggctgggcgtgatcctgaacct

SEQ ID NO: 7399 - RNA, 22 nt, synthetic construct
  source 1..22: mol_type = other RNA
ggctggtggcggccggcggcct

SEQ ID NO: 7400 - RNA, 22 nt, synthetic construct
  source 1..22: mol_type = other RNA
ggcttgtgtcgctggcgtccac

SEQ ID NO: 7401 - RNA, 22 nt, synthetic construct
  source 1..22: mol_type = other RNA
ggctttctacctctgcgccgag

SEQ ID NO: 7402 - RNA, 22 nt, synthetic construct
  source 1..22: mol_type = other RNA
gggaagagccactcggctgcgc

SEQ ID NO: 7403 - RNA, 22 nt, synthetic construct
  source 1..22: mol_type = other RNA
gggcaactgcgcgctgcacggg

SEQ ID NO: 7404 - RNA, 22 nt, synthetic construct
  source 1..22: mol_type = other RNA
gggcacgctggcgctcgtggag

SEQ ID NO: 7405 - RNA, 22 nt, synthetic construct
  source 1..22: mol_type = other RNA
gggccaggcggtgcagcgacgc

SEQ ID NO: 7406 - RNA, 22 nt, synthetic construct
  source 1..22: mol_type = other RNA
gggcccgacgacctgcagcgcc

SEQ ID NO: 7407 - RNA, 22 nt, synthetic construct
  source 1..22: mol_type = other RNA
gggcccgcggccctggcttgtg

SEQ ID NO: 7408 - RNA, 22 nt, synthetic construct
  source 1..22: mol_type = other RNA
gggccgcgggcccgacgacctg

SEQ ID NO: 7409 - RNA, 22 nt, synthetic construct
  source 1..22: mol_type = other RNA
gggcgaagcggccagggtccag

SEQ ID NO: 7410 - RNA, 22 nt, synthetic construct
  source 1..22: mol_type = other RNA
gggcgtgatcctgaacctggcg

SEQ ID NO: 7411 - RNA, 22 nt, synthetic construct
  source 1..22: mol_type = other RNA
gggctgggcgtgatcctgaacc

SEQ ID NO: 7412 - RNA, 22 nt, synthetic construct
  source 1..22: mol_type = other RNA
gggctttctacctctgcgccga

SEQ ID NO: 7413 - RNA, 22 nt, synthetic construct
  source 1..22: mol_type = other RNA
ggggccaggcggtgcagcgacg

SEQ ID NO: 7414 - RNA, 22 nt, synthetic construct
  source 1..22: mol_type = other RNA
ggggctttctacctctgcgccg

SEQ ID NO: 7415 - RNA, 22 nt, synthetic construct
  source 1..22: mol_type = other RNA
gggggccaggcggtgcagcgac

SEQ ID NO: 7416 - RNA, 22 nt, synthetic construct
  source 1..22: mol_type = other RNA
ggggtccgtgcggcggcaccaa

SEQ ID NO: 7417 - RNA, 22 nt, synthetic construct
  source 1..22: mol_type = other RNA
gggtccagcgaggccacaagcg

SEQ ID NO: 7418 - RNA, 22 nt, synthetic construct
  source 1..22: mol_type = other RNA
gggtccgtgcggcggcaccaat

SEQ ID NO: 7419 - RNA, 22 nt, synthetic construct
  source 1..22: mol_type = other RNA
gggttcgcgttccttcgccagg

SEQ ID NO: 7420 - RNA, 22 nt, synthetic construct
  source 1..22: mol_type = other RNA
ggtagaaagccccgatgcactg

SEQ ID NO: 7421 - RNA, 22 nt, synthetic construct
  source 1..22: mol_type = other RNA
ggtagagaagcgcgcagccgag

SEQ ID NO: 7422 - RNA, 22 nt, synthetic construct
  source 1..22: mol_type = other RNA
ggtccagcgaggccacaagcgg

SEQ ID NO: 7423 - RNA, 22 nt, synthetic construct
  source 1..22: mol_type = other RNA
ggtccgtgcggcggcaccaata

SEQ ID NO: 7424 - RNA, 22 nt, synthetic construct
  source 1..22: mol_type = other RNA
ggtcgtcgggcccgcggccctg

SEQ ID NO: 7425 - RNA, 22 nt, synthetic construct
  source 1..22: mol_type = other RNA
ggtcttgccttgcaggctcttg

SEQ ID NO: 7426 - RNA, 22 nt, synthetic construct
  source 1..22: mol_type = other RNA
ggtgcagcgacgcatggtagag

SEQ ID NO: 7427 - RNA, 22 nt, synthetic construct
  source 1..22: mol_type = other RNA
ggtgccgccgcacggaccccgc

SEQ ID NO: 7428 - RNA, 22 nt, synthetic construct
  source 1..22: mol_type = other RNA
ggtgctgtattggtgccgccgc

SEQ ID NO: 7429 - RNA, 22 nt, synthetic construct
  source 1..22: mol_type = other RNA
ggtggacgccagcgacacaagc

SEQ ID NO: 7430 - RNA, 22 nt, synthetic construct
  source 1..22: mol_type = other RNA
ggtggagcgcgaggtggagcgc

SEQ ID NO: 7431 - RNA, 22 nt, synthetic construct
  source 1..22: mol_type = other RNA
ggtggagcgctcgggcacgctg

SEQ ID NO: 7432 - RNA, 22 nt, synthetic construct
  source 1..22: mol_type = other RNA
ggtggcggccggcggcctggac

SEQ ID NO: 7433 - RNA, 22 nt, synthetic construct
  source 1..22: mol_type = other RNA
ggtgggtgcagatgtggggttg

SEQ ID NO: 7434 - RNA, 22 nt, synthetic construct
  source 1..22: mol_type = other RNA
ggtgttggcgactaacaaggag

SEQ ID NO: 7435 - RNA, 22 nt, synthetic construct
  source 1..22: mol_type = other RNA
ggttagagtcgagcaacggcac

SEQ ID NO: 7436 - RNA, 22 nt, synthetic construct
  source 1..22: mol_type = other RNA
ggttcaggatcacgcccagccc

SEQ ID NO: 7437 - RNA, 22 nt, synthetic construct
  source 1..22: mol_type = other RNA
ggttcgcgttccttcgccaggt

SEQ ID NO: 7438 - RNA, 22 nt, synthetic construct
  source 1..22: mol_type = other RNA
gtagaaagccccgatgcactgc

SEQ ID NO: 7439 - RNA, 22 nt, synthetic construct
  source 1..22: mol_type = other RNA
gtagagaagcgcgcagccgagt

SEQ ID NO: 7440 - RNA, 22 nt, synthetic construct
  source 1..22: mol_type = other RNA
gtagagctggcgcggagcgtgg

SEQ ID NO: 7441 - RNA, 22 nt, synthetic construct
  source 1..22: mol_type = other RNA
gtagcggtgttggcgactaaca

SEQ ID NO: 7442 - RNA, 22 nt, synthetic construct
  source 1..22: mol_type = other RNA
gtattggtgccgccgcacggac

SEQ ID NO: 7443 - RNA, 22 nt, synthetic construct
  source 1..22: mol_type = other RNA
gtccaccagacagcgggcgaag

SEQ ID NO: 7444 - RNA, 22 nt, synthetic construct
  source 1..22: mol_type = other RNA
gtccagcgaggccacaagcggc

SEQ ID NO: 7445 - RNA, 22 nt, synthetic construct
  source 1..22: mol_type = other RNA
gtccaggccgccggccgccacc

SEQ ID NO: 7446 - RNA, 22 nt, synthetic construct
  source 1..22: mol_type = other RNA
gtccgtgcggcggcaccaatac

SEQ ID NO: 7447 - RNA, 22 nt, synthetic construct
  source 1..22: mol_type = other RNA
gtcctccttggagaaggcgagc

SEQ ID NO: 7448 - RNA, 22 nt, synthetic construct
  source 1..22: mol_type = other RNA
gtcgagcaacggcacgaggcgc

SEQ ID NO: 7449 - RNA, 22 nt, synthetic construct
  source 1..22: mol_type = other RNA
gtcgccaacaccgctactgcga

SEQ ID NO: 7450 - RNA, 22 nt, synthetic construct
  source 1..22: mol_type = other RNA
gtcgctgcaccgcctggccccc

SEQ ID NO: 7451 - RNA, 22 nt, synthetic construct
  source 1..22: mol_type = other RNA
gtcgctggcgtccaccagacag

SEQ ID NO: 7452 - RNA, 22 nt, synthetic construct
  source 1..22: mol_type = other RNA
gtcgggcccgcggccctggctt

SEQ ID NO: 7453 - RNA, 22 nt, synthetic construct
  source 1..22: mol_type = other RNA
gtcgtcgggcccgcggccctgg

SEQ ID NO: 7454 - RNA, 22 nt, synthetic construct
  source 1..22: mol_type = other RNA
gtctcctccgaatgcttgaaca

SEQ ID NO: 7455 - RNA, 22 nt, synthetic construct
  source 1..22: mol_type = other RNA
gtctggtggacgccagcgacac

SEQ ID NO: 7456 - RNA, 22 nt, synthetic construct
  source 1..22: mol_type = other RNA
gtcttgccttgcaggctcttga

SEQ ID NO: 7457 - RNA, 22 nt, synthetic construct
  source 1..22: mol_type = other RNA
gtgatcctgaacctggcgaagg

SEQ ID NO: 7458 - RNA, 22 nt, synthetic construct
  source 1..22: mol_type = other RNA
gtgcagccgaagcagctcgtcc

SEQ ID NO: 7459 - RNA, 22 nt, synthetic construct
  source 1..22: mol_type = other RNA
gtgcagcgacgcatggtagaga

SEQ ID NO: 7460 - RNA, 22 nt, synthetic construct
  source 1..22: mol_type = other RNA
gtgcagcgcgcagttgcccagc

SEQ ID NO: 7461 - RNA, 22 nt, synthetic construct
  source 1..22: mol_type = other RNA
gtgcatcggggctttctacctc

SEQ ID NO: 7462 - RNA, 22 nt, synthetic construct
  source 1..22: mol_type = other RNA
gtgcccgagcgctccacctcgc

SEQ ID NO: 7463 - RNA, 22 nt, synthetic construct
  source 1..22: mol_type = other RNA
gtgccgccgcacggaccccgcg

SEQ ID NO: 7464 - RNA, 22 nt, synthetic construct
  source 1..22: mol_type = other RNA
gtgccgttgctcgactctaacc

SEQ ID NO: 7465 - RNA, 22 nt, synthetic construct
  source 1..22: mol_type = other RNA
gtgcggcggcaccaatacagca

SEQ ID NO: 7466 - RNA, 22 nt, synthetic construct
  source 1..22: mol_type = other RNA
gtgctccaagatgcctgccacg

SEQ ID NO: 7467 - RNA, 22 nt, synthetic construct
  source 1..22: mol_type = other RNA
gtgctgtattggtgccgccgca

SEQ ID NO: 7468 - RNA, 22 nt, synthetic construct
  source 1..22: mol_type = other RNA
gtggacgccagcgacacaagcc

SEQ ID NO: 7469 - RNA, 22 nt, synthetic construct
  source 1..22: mol_type = other RNA
gtggagccgcttgtggcctcgc

SEQ ID NO: 7470 - RNA, 22 nt, synthetic construct
  source 1..22: mol_type = other RNA
gtggagcgcgaggtggagcgct

SEQ ID NO: 7471 - RNA, 22 nt, synthetic construct
  source 1..22: mol_type = other RNA
gtggagcgctcgggcacgctgg

SEQ ID NO: 7472 - RNA, 22 nt, synthetic construct
  source 1..22: mol_type = other RNA
gtggcaggcatcttggagcaca

SEQ ID NO: 7473 - RNA, 22 nt, synthetic construct
  source 1..22: mol_type = other RNA
gtggcctcgctggaccctggcc

SEQ ID NO: 7474 - RNA, 22 nt, synthetic construct
  source 1..22: mol_type = other RNA
gtggcgcagcagcgcggggtcc

SEQ ID NO: 7475 - RNA, 22 nt, synthetic construct
  source 1..22: mol_type = other RNA
gtggcgcgcattgggctgggcg

SEQ ID NO: 7476 - RNA, 22 nt, synthetic construct
  source 1..22: mol_type = other RNA
gtggcggccggcggcctggacg

SEQ ID NO: 7477 - RNA, 22 nt, synthetic construct
  source 1..22: mol_type = other RNA
gtggctcttcccgctcgccttc

SEQ ID NO: 7478 - RNA, 22 nt, synthetic construct
  source 1..22: mol_type = other RNA
gtgggtgcagatgtggggttgg

SEQ ID NO: 7479 - RNA, 22 nt, synthetic construct
  source 1..22: mol_type = other RNA
gtgtcgctggcgtccaccagac

SEQ ID NO: 7480 - RNA, 22 nt, synthetic construct
  source 1..22: mol_type = other RNA
gtgttggcgactaacaaggagg

SEQ ID NO: 7481 - RNA, 22 nt, synthetic construct
  source 1..22: mol_type = other RNA
gttagagtcgagcaacggcacg

SEQ ID NO: 7482 - RNA, 22 nt, synthetic construct
  source 1..22: mol_type = other RNA
gttagtcgccaacaccgctact

SEQ ID NO: 7483 - RNA, 22 nt, synthetic construct
  source 1..22: mol_type = other RNA
gttcaagcattcggaggagaca

SEQ ID NO: 7484 - RNA, 22 nt, synthetic construct
  source 1..22: mol_type = other RNA
gttcaggatcacgcccagccca

SEQ ID NO: 7485 - RNA, 22 nt, synthetic construct
  source 1..22: mol_type = other RNA
gttccttcgccaggttcaggat

SEQ ID NO: 7486 - RNA, 22 nt, synthetic construct
  source 1..22: mol_type = other RNA
gttcgcgttccttcgccaggtt

SEQ ID NO: 7487 - RNA, 22 nt, synthetic construct
  source 1..22: mol_type = other RNA
gttgcccagcgccagcgcgcag

SEQ ID NO: 7488 - RNA, 22 nt, synthetic construct
  source 1..22: mol_type = other RNA
gttgctcgactctaaccgcttg

SEQ ID NO: 7489 - RNA, 22 nt, synthetic construct
  source 1..22: mol_type = other RNA
gttggcgactaacaaggaggtg

SEQ ID NO: 7490 - RNA, 22 nt, synthetic construct
  source 1..22: mol_type = other RNA
taacaaggaggtggagcgcgag

SEQ ID NO: 7491 - RNA, 22 nt, synthetic construct
  source 1..22: mol_type = other RNA
taaccgcttggaggcgcagtgc

SEQ ID NO: 7492 - RNA, 22 nt, synthetic construct
  source 1..22: mol_type = other RNA
tacagcaccgcgtccaggccgc

SEQ ID NO: 7493 - RNA, 22 nt, synthetic construct
  source 1..22: mol_type = other RNA
taccatgcgtcgctgcaccgcc

SEQ ID NO: 7494 - RNA, 22 nt, synthetic construct
  source 1..22: mol_type = other RNA
tacctctgcgccgaggctgcca

SEQ ID NO: 7495 - RNA, 22 nt, synthetic construct
  source 1..22: mol_type = other RNA
tacgggttcgcgttccttcgcc

SEQ ID NO: 7496 - RNA, 22 nt, synthetic construct
  source 1..22: mol_type = other RNA
tactgcgaggcaggcgtgcagc

SEQ ID NO: 7497 - RNA, 22 nt, synthetic construct
  source 1..22: mol_type = other RNA
tagaaagccccgatgcactgcg

SEQ ID NO: 7498 - RNA, 22 nt, synthetic construct
  source 1..22: mol_type = other RNA
tagagaagcgcgcagccgagtg

SEQ ID NO: 7499 - RNA, 22 nt, synthetic construct
  source 1..22: mol_type = other RNA
tagagctggcgcggagcgtggc

SEQ ID NO: 7500 - RNA, 22 nt, synthetic construct
  source 1..22: mol_type = other RNA
tagagtcgagcaacggcacgag

SEQ ID NO: 7501 - RNA, 22 nt, synthetic construct
  source 1..22: mol_type = other RNA
tagcggtgttggcgactaacaa

SEQ ID NO: 7502 - RNA, 22 nt, synthetic construct
  source 1..22: mol_type = other RNA
tagtcgccaacaccgctactgc

SEQ ID NO: 7503 - RNA, 22 nt, synthetic construct
  source 1..22: mol_type = other RNA
tattggtgccgccgcacggacc

SEQ ID NO: 7504 - RNA, 22 nt, synthetic construct
  source 1..22: mol_type = other RNA
tcaagagcctgcaaggcaagac

SEQ ID NO: 7505 - RNA, 22 nt, synthetic construct
  source 1..22: mol_type = other RNA
tcaagcattcggaggagacatg

SEQ ID NO: 7506 - RNA, 22 nt, synthetic construct
  source 1..22: mol_type = other RNA
tcacgcccagcccaatgcgcgc

SEQ ID NO: 7507 - RNA, 22 nt, synthetic construct
  source 1..22: mol_type = other RNA
tcaggatcacgcccagcccaat

SEQ ID NO: 7508 - RNA, 22 nt, synthetic construct
  source 1..22: mol_type = other RNA
tccaagatgcctgccacgctcc

SEQ ID NO: 7509 - RNA, 22 nt, synthetic construct
  source 1..22: mol_type = other RNA
tccaagcggttagagtcgagca

SEQ ID NO: 7510 - RNA, 22 nt, synthetic construct
  source 1..22: mol_type = other RNA
tccaaggaggacgagctgcttc

SEQ ID NO: 7511 - RNA, 22 nt, synthetic construct
  source 1..22: mol_type = other RNA
tccaccagacagcgggcgaagc

SEQ ID NO: 7512 - RNA, 22 nt, synthetic construct
  source 1..22: mol_type = other RNA
tccacccaaccccacatctgca

SEQ ID NO: 7513 - RNA, 22 nt, synthetic construct
  source 1..22: mol_type = other RNA
tccacctccttgttagtcgcca

SEQ ID NO: 7514 - RNA, 22 nt, synthetic construct
  source 1..22: mol_type = other RNA
tccacctcgcgctccacctcct

SEQ ID NO: 7515 - RNA, 22 nt, synthetic construct
  source 1..22: mol_type = other RNA
tccacgagcgccagcgtgcccg

SEQ ID NO: 7516 - RNA, 22 nt, synthetic construct
  source 1..22: mol_type = other RNA
tccagcgaggccacaagcggct

SEQ ID NO: 7517 - RNA, 22 nt, synthetic construct
  source 1..22: mol_type = other RNA
tccaggccgccggccgccacca

SEQ ID NO: 7518 - RNA, 22 nt, synthetic construct
  source 1..22: mol_type = other RNA
tcccgctcgccttctccaagga

SEQ ID NO: 7519 - RNA, 22 nt, synthetic construct
  source 1..22: mol_type = other RNA
tccgaatgcttgaacatgtgct

SEQ ID NO: 7520 - RNA, 22 nt, synthetic construct
  source 1..22: mol_type = other RNA
tccgcgccagctctacgggttc

SEQ ID NO: 7521 - RNA, 22 nt, synthetic construct
  source 1..22: mol_type = other RNA
tccgtgcggcggcaccaataca

SEQ ID NO: 7522 - RNA, 22 nt, synthetic construct
  source 1..22: mol_type = other RNA
tcctccgaatgcttgaacatgt

SEQ ID NO: 7523 - RNA, 22 nt, synthetic construct
  source 1..22: mol_type = other RNA
tcctccttggagaaggcgagcg

SEQ ID NO: 7524 - RNA, 22 nt, synthetic construct
  source 1..22: mol_type = other RNA
tcctgaacctggcgaaggaacg

SEQ ID NO: 7525 - RNA, 22 nt, synthetic construct
  source 1..22: mol_type = other RNA
tccttcgccaggttcaggatca

SEQ ID NO: 7526 - RNA, 22 nt, synthetic construct
  source 1..22: mol_type = other RNA
tccttggagaaggcgagcggga

SEQ ID NO: 7527 - RNA, 22 nt, synthetic construct
  source 1..22: mol_type = other RNA
tccttgttagtcgccaacaccg

SEQ ID NO: 7528 - RNA, 22 nt, synthetic construct
  source 1..22: mol_type = other RNA
tcgactctaaccgcttggaggc

SEQ ID NO: 7529 - RNA, 22 nt, synthetic construct
  source 1..22: mol_type = other RNA
tcgagcaacggcacgaggcgct

SEQ ID NO: 7530 - RNA, 22 nt, synthetic construct
  source 1..22: mol_type = other RNA
tcgcagtagcggtgttggcgac

SEQ ID NO: 7531 - RNA, 22 nt, synthetic construct
  source 1..22: mol_type = other RNA
tcgccaacaccgctactgcgag

SEQ ID NO: 7532 - RNA, 22 nt, synthetic construct
  source 1..22: mol_type = other RNA
tcgccaggttcaggatcacgcc

SEQ ID NO: 7533 - RNA, 22 nt, synthetic construct
  source 1..22: mol_type = other RNA
tcgcccgctgtctggtggacgc

SEQ ID NO: 7534 - RNA, 22 nt, synthetic construct
  source 1..22: mol_type = other RNA
tcgccttctccaaggaggacga

SEQ ID NO: 7535 - RNA, 22 nt, synthetic construct
  source 1..22: mol_type = other RNA
tcgcgctccacctccttgttag

SEQ ID NO: 7536 - RNA, 22 nt, synthetic construct
  source 1..22: mol_type = other RNA
tcgcgttccttcgccaggttca

SEQ ID NO: 7537 - RNA, 22 nt, synthetic construct
  source 1..22: mol_type = other RNA
tcgctgcaccgcctggcccccg

SEQ ID NO: 7538 - RNA, 22 nt, synthetic construct
  source 1..22: mol_type = other RNA
tcgctggaccctggccgcttcg

SEQ ID NO: 7539 - RNA, 22 nt, synthetic construct
  source 1..22: mol_type = other RNA
tcgctggcgtccaccagacagc

SEQ ID NO: 7540 - RNA, 22 nt, synthetic construct
  source 1..22: mol_type = other RNA
tcggaggagacatgccagaggc

SEQ ID NO: 7541 - RNA, 22 nt, synthetic construct
  source 1..22: mol_type = other RNA
tcggcgcagaggtagaaagccc

SEQ ID NO: 7542 - RNA, 22 nt, synthetic construct
  source 1..22: mol_type = other RNA
tcggctgcacgcctgcctcgca

SEQ ID NO: 7543 - RNA, 22 nt, synthetic construct
  source 1..22: mol_type = other RNA
tcggctgcgcgcttctctacca

SEQ ID NO: 7544 - RNA, 22 nt, synthetic construct
  source 1..22: mol_type = other RNA
tcgggcacgctggcgctcgtgg

SEQ ID NO: 7545 - RNA, 22 nt, synthetic construct
  source 1..22: mol_type = other RNA
tcgggcccgcggccctggcttg

SEQ ID NO: 7546 - RNA, 22 nt, synthetic construct
  source 1..22: mol_type = other RNA
tcggggctttctacctctgcgc

SEQ ID NO: 7547 - RNA, 22 nt, synthetic construct
  source 1..22: mol_type = other RNA
tcgtcctccttggagaaggcga

SEQ ID NO: 7548 - RNA, 22 nt, synthetic construct
  source 1..22: mol_type = other RNA
tcgtcgggcccgcggccctggc

SEQ ID NO: 7549 - RNA, 22 nt, synthetic construct
  source 1..22: mol_type = other RNA
tcgtgccgttgctcgactctaa

SEQ ID NO: 7550 - RNA, 22 nt, synthetic construct
  source 1..22: mol_type = other RNA
tcgtggagccgcttgtggcctc

SEQ ID NO: 7551 - RNA, 22 nt, synthetic construct
  source 1..22: mol_type = other RNA
tctaaccgcttggaggcgcagt

SEQ ID NO: 7552 - RNA, 22 nt, synthetic construct
  source 1..22: mol_type = other RNA
tctaccatgcgtcgctgcaccg

SEQ ID NO: 7553 - RNA, 22 nt, synthetic construct
  source 1..22: mol_type = other RNA
tctacctctgcgccgaggctgc

SEQ ID NO: 7554 - RNA, 22 nt, synthetic construct
  source 1..22: mol_type = other RNA
tctacgggttcgcgttccttcg

SEQ ID NO: 7555 - RNA, 22 nt, synthetic construct
  source 1..22: mol_type = other RNA
tctccaaggaggacgagctgct

SEQ ID NO: 7556 - RNA, 22 nt, synthetic construct
  source 1..22: mol_type = other RNA
tctcctccgaatgcttgaacat

SEQ ID NO: 7557 - RNA, 22 nt, synthetic construct
  source 1..22: mol_type = other RNA
tctctaccatgcgtcgctgcac

SEQ ID NO: 7558 - RNA, 22 nt, synthetic construct
  source 1..22: mol_type = other RNA
tctgcacccaccttggtcttgc

SEQ ID NO: 7559 - RNA, 22 nt, synthetic construct
  source 1..22: mol_type = other RNA
tctgcgccgaggctgccatcaa

SEQ ID NO: 7560 - RNA, 22 nt, synthetic construct
  source 1..22: mol_type = other RNA
tctggcatgtctcctccgaatg

SEQ ID NO: 7561 - RNA, 22 nt, synthetic construct
  source 1..22: mol_type = other RNA
tctggtggacgccagcgacaca

SEQ ID NO: 7562 - RNA, 22 nt, synthetic construct
  source 1..22: mol_type = other RNA
tcttcccgctcgccttctccaa

SEQ ID NO: 7563 - RNA, 22 nt, synthetic construct
  source 1..22: mol_type = other RNA
tcttgatggcagcctcggcgca

SEQ ID NO: 7564 - RNA, 22 nt, synthetic construct
  source 1..22: mol_type = other RNA
tcttgccttgcaggctcttgat

SEQ ID NO: 7565 - RNA, 22 nt, synthetic construct
  source 1..22: mol_type = other RNA
tcttggagcacatgttcaagca

SEQ ID NO: 7566 - RNA, 22 nt, synthetic construct
  source 1..22: mol_type = other RNA
tgaacatgtgctccaagatgcc

SEQ ID NO: 7567 - RNA, 22 nt, synthetic construct
  source 1..22: mol_type = other RNA
tgaacctggcgaaggaacgcga

SEQ ID NO: 7568 - RNA, 22 nt, synthetic construct
  source 1..22: mol_type = other RNA
tgatccacccaaccccacatct

SEQ ID NO: 7569 - RNA, 22 nt, synthetic construct
  source 1..22: mol_type = other RNA
tgatcctgaacctggcgaagga

SEQ ID NO: 7570 - RNA, 22 nt, synthetic construct
  source 1..22: mol_type = other RNA
tgatggcagcctcggcgcagag

SEQ ID NO: 7571 - RNA, 22 nt, synthetic construct
  source 1..22: mol_type = other RNA
tgcaaggcaagaccaaggtggg

SEQ ID NO: 7572 - RNA, 22 nt, synthetic construct
  source 1..22: mol_type = other RNA
tgcacccaccttggtcttgcct

SEQ ID NO: 7573 - RNA, 22 nt, synthetic construct
  source 1..22: mol_type = other RNA
tgcaccgcctggcccccgtgca

SEQ ID NO: 7574 - RNA, 22 nt, synthetic construct
  source 1..22: mol_type = other RNA
tgcacgcctgcctcgcagtagc

SEQ ID NO: 7575 - RNA, 22 nt, synthetic construct
  source 1..22: mol_type = other RNA
tgcacgggggccaggcggtgca

SEQ ID NO: 7576 - RNA, 22 nt, synthetic construct
  source 1..22: mol_type = other RNA
tgcactgcgcctccaagcggtt

SEQ ID NO: 7577 - RNA, 22 nt, synthetic construct
  source 1..22: mol_type = other RNA
tgcagccgaagcagctcgtcct

SEQ ID NO: 7578 - RNA, 22 nt, synthetic construct
  source 1..22: mol_type = other RNA
tgcagcgacgcatggtagagaa

SEQ ID NO: 7579 - RNA, 22 nt, synthetic construct
  source 1..22: mol_type = other RNA
tgcagcgcctcgtgccgttgct

SEQ ID NO: 7580 - RNA, 22 nt, synthetic construct
  source 1..22: mol_type = other RNA
tgcagcgcgcagttgcccagcg

SEQ ID NO: 7581 - RNA, 22 nt, synthetic construct
  source 1..22: mol_type = other RNA
tgcaggctcttgatggcagcct

SEQ ID NO: 7582 - RNA, 22 nt, synthetic construct
  source 1..22: mol_type = other RNA
tgcaggtcgtcgggcccgcggc

SEQ ID NO: 7583 - RNA, 22 nt, synthetic construct
  source 1..22: mol_type = other RNA
tgcatcggggctttctacctct

SEQ ID NO: 7584 - RNA, 22 nt, synthetic construct
  source 1..22: mol_type = other RNA
tgccacgctccgcgccagctct

SEQ ID NO: 7585 - RNA, 22 nt, synthetic construct
  source 1..22: mol_type = other RNA
tgccagaggctggtggcggccg

SEQ ID NO: 7586 - RNA, 22 nt, synthetic construct
  source 1..22: mol_type = other RNA
tgccatcaagagcctgcaaggc

SEQ ID NO: 7587 - RNA, 22 nt, synthetic construct
  source 1..22: mol_type = other RNA
tgcccagcgccagcgcgcagtg

SEQ ID NO: 7588 - RNA, 22 nt, synthetic construct
  source 1..22: mol_type = other RNA
tgcccgagcgctccacctcgcg

SEQ ID NO: 7589 - RNA, 22 nt, synthetic construct
  source 1..22: mol_type = other RNA
tgccgccgcacggaccccgcgc

SEQ ID NO: 7590 - RNA, 22 nt, synthetic construct
  source 1..22: mol_type = other RNA
tgccgttgctcgactctaaccg

SEQ ID NO: 7591 - RNA, 22 nt, synthetic construct
  source 1..22: mol_type = other RNA
tgcctcgcagtagcggtgttgg

SEQ ID NO: 7592 - RNA, 22 nt, synthetic construct
  source 1..22: mol_type = other RNA
tgcctgccacgctccgcgccag

SEQ ID NO: 7593 - RNA, 22 nt, synthetic construct
  source 1..22: mol_type = other RNA
tgccttgcaggctcttgatggc

SEQ ID NO: 7594 - RNA, 22 nt, synthetic construct
  source 1..22: mol_type = other RNA
tgcgaggcaggcgtgcagccga

SEQ ID NO: 7595 - RNA, 22 nt, synthetic construct
  source 1..22: mol_type = other RNA
tgcgccactgcgcgctggcgct

SEQ ID NO: 7596 - RNA, 22 nt, synthetic construct
  source 1..22: mol_type = other RNA
tgcgccgaggctgccatcaaga

SEQ ID NO: 7597 - RNA, 22 nt, synthetic construct
  source 1..22: mol_type = other RNA
tgcgcctccaagcggttagagt

SEQ ID NO: 7598 - RNA, 22 nt, synthetic construct
  source 1..22: mol_type = other RNA
tgcgcgctgcacgggggccagg

SEQ ID NO: 7599 - RNA, 22 nt, synthetic construct
  source 1..22: mol_type = other RNA
tgcgcgctggcgctgggcaact

SEQ ID NO: 7600 - RNA, 22 nt, synthetic construct
  source 1..22: mol_type = other RNA
tgcgcgcttctctaccatgcgt

SEQ ID NO: 7601 - RNA, 22 nt, synthetic construct
  source 1..22: mol_type = other RNA
tgcggcggcaccaatacagcac

SEQ ID NO: 7602 - RNA, 22 nt, synthetic construct
  source 1..22: mol_type = other RNA
tgcgtcgctgcaccgcctggcc

SEQ ID NO: 7603 - RNA, 22 nt, synthetic construct
  source 1..22: mol_type = other RNA
tgctccaagatgcctgccacgc

SEQ ID NO: 7604 - RNA, 22 nt, synthetic construct
  source 1..22: mol_type = other RNA
tgctcgactctaaccgcttgga

SEQ ID NO: 7605 - RNA, 22 nt, synthetic construct
  source 1..22: mol_type = other RNA
tgctgcgccactgcgcgctggc

SEQ ID NO: 7606 - RNA, 22 nt, synthetic construct
  source 1..22: mol_type = other RNA
tgctgtattggtgccgccgcac

SEQ ID NO: 7607 - RNA, 22 nt, synthetic construct
  source 1..22: mol_type = other RNA
tgcttcggctgcacgcctgcct

SEQ ID NO: 7608 - RNA, 22 nt, synthetic construct
  source 1..22: mol_type = other RNA
tgcttgaacatgtgctccaaga

SEQ ID NO: 7609 - RNA, 22 nt, synthetic construct
  source 1..22: mol_type = other RNA
tggaccctggccgcttcgcccg

SEQ ID NO: 7610 - RNA, 22 nt, synthetic construct
  source 1..22: mol_type = other RNA
tggacgccagcgacacaagcca

SEQ ID NO: 7611 - RNA, 22 nt, synthetic construct
  source 1..22: mol_type = other RNA
tggacgcggtgctgtattggtg

SEQ ID NO: 7612 - RNA, 22 nt, synthetic construct
  source 1..22: mol_type = other RNA
tggagaaggcgagcgggaagag

SEQ ID NO: 7613 - RNA, 22 nt, synthetic construct
  source 1..22: mol_type = other RNA
tggagcacatgttcaagcattc

SEQ ID NO: 7614 - RNA, 22 nt, synthetic construct
  source 1..22: mol_type = other RNA
tggagccgcttgtggcctcgct

SEQ ID NO: 7615 - RNA, 22 nt, synthetic construct
  source 1..22: mol_type = other RNA
tggagcgcgaggtggagcgctc

SEQ ID NO: 7616 - RNA, 22 nt, synthetic construct
  source 1..22: mol_type = other RNA
tggagcgctcgggcacgctggc

SEQ ID NO: 7617 - RNA, 22 nt, synthetic construct
  source 1..22: mol_type = other RNA
tggaggcgcagtgcatcggggc

SEQ ID NO: 7618 - RNA, 22 nt, synthetic construct
  source 1..22: mol_type = other RNA
tggcagcctcggcgcagaggta

SEQ ID NO: 7619 - RNA, 22 nt, synthetic construct
  source 1..22: mol_type = other RNA
tggcaggcatcttggagcacat

SEQ ID NO: 7620 - RNA, 22 nt, synthetic construct
  source 1..22: mol_type = other RNA
tggcatgtctcctccgaatgct

SEQ ID NO: 7621 - RNA, 22 nt, synthetic construct
  source 1..22: mol_type = other RNA
tggcccccgtgcagcgcgcagt

SEQ ID NO: 7622 - RNA, 22 nt, synthetic construct
  source 1..22: mol_type = other RNA
tggccgcttcgcccgctgtctg

SEQ ID NO: 7623 - RNA, 22 nt, synthetic construct
  source 1..22: mol_type = other RNA
tggcctcgctggaccctggccg

SEQ ID NO: 7624 - RNA, 22 nt, synthetic construct
  source 1..22: mol_type = other RNA
tggcgaaggaacgcgaacccgt

SEQ ID NO: 7625 - RNA, 22 nt, synthetic construct
  source 1..22: mol_type = other RNA
tggcgactaacaaggaggtgga

SEQ ID NO: 7626 - RNA, 22 nt, synthetic construct
  source 1..22: mol_type = other RNA
tggcgcagcagcgcggggtccg

SEQ ID NO: 7627 - RNA, 22 nt, synthetic construct
  source 1..22: mol_type = other RNA
tggcgcgcattgggctgggcgt

SEQ ID NO: 7628 - RNA, 22 nt, synthetic construct
  source 1..22: mol_type = other RNA
tggcgcggagcgtggcaggcat

SEQ ID NO: 7629 - RNA, 22 nt, synthetic construct
  source 1..22: mol_type = other RNA
tggcgctcgtggagccgcttgt

SEQ ID NO: 7630 - RNA, 22 nt, synthetic construct
  source 1..22: mol_type = other RNA
tggcgctgggcaactgcgcgct

SEQ ID NO: 7631 - RNA, 22 nt, synthetic construct
  source 1..22: mol_type = other RNA
tggcggccggcggcctggacgc

SEQ ID NO: 7632 - RNA, 22 nt, synthetic construct
  source 1..22: mol_type = other RNA
tggcgtccaccagacagcgggc

SEQ ID NO: 7633 - RNA, 22 nt, synthetic construct
  source 1..22: mol_type = other RNA
tggctcttcccgctcgccttct

SEQ ID NO: 7634 - RNA, 22 nt, synthetic construct
  source 1..22: mol_type = other RNA
tggcttgtgtcgctggcgtcca

SEQ ID NO: 7635 - RNA, 22 nt, synthetic construct
  source 1..22: mol_type = other RNA
tgggcaactgcgcgctgcacgg

SEQ ID NO: 7636 - RNA, 22 nt, synthetic construct
  source 1..22: mol_type = other RNA
tgggcgtgatcctgaacctggc

SEQ ID NO: 7637 - RNA, 22 nt, synthetic construct
  source 1..22: mol_type = other RNA
tgggctgggcgtgatcctgaac

SEQ ID NO: 7638 - RNA, 22 nt, synthetic construct
  source 1..22: mol_type = other RNA
tggtagagaagcgcgcagccga

SEQ ID NO: 7639 - RNA, 22 nt, synthetic construct
  source 1..22: mol_type = other RNA
tggtcttgccttgcaggctctt

SEQ ID NO: 7640 - RNA, 22 nt, synthetic construct
  source 1..22: mol_type = other RNA
tggtgccgccgcacggaccccg

SEQ ID NO: 7641 - RNA, 22 nt, synthetic construct
  source 1..22: mol_type = other RNA
tggtggacgccagcgacacaag

SEQ ID NO: 7642 - RNA, 22 nt, synthetic construct
  source 1..22: mol_type = other RNA
tggtggcggccggcggcctgga

SEQ ID NO: 7643 - RNA, 22 nt, synthetic construct
  source 1..22: mol_type = other RNA
tgtattggtgccgccgcacgga

SEQ ID NO: 7644 - RNA, 22 nt, synthetic construct
  source 1..22: mol_type = other RNA
tgtcgctggcgtccaccagaca

SEQ ID NO: 7645 - RNA, 22 nt, synthetic construct
  source 1..22: mol_type = other RNA
tgtctcctccgaatgcttgaac

SEQ ID NO: 7646 - RNA, 22 nt, synthetic construct
  source 1..22: mol_type = other RNA
tgtctggtggacgccagcgaca

SEQ ID NO: 7647 - RNA, 22 nt, synthetic construct
  source 1..22: mol_type = other RNA
tgtgctccaagatgcctgccac

SEQ ID NO: 7648 - RNA, 22 nt, synthetic construct
  source 1..22: mol_type = other RNA
tgtggcctcgctggaccctggc

SEQ ID NO: 7649 - RNA, 22 nt, synthetic construct
  source 1..22: mol_type = other RNA
tgtgtcgctggcgtccaccaga

SEQ ID NO: 7650 - RNA, 22 nt, synthetic construct
  source 1..22: mol_type = other RNA
tgttagtcgccaacaccgctac

SEQ ID NO: 7651 - RNA, 22 nt, synthetic construct
  source 1..22: mol_type = other RNA
tgttcaagcattcggaggagac

SEQ ID NO: 7652 - RNA, 22 nt, synthetic construct
  source 1..22: mol_type = other RNA
tgttggcgactaacaaggaggt

SEQ ID NO: 7653 - RNA, 22 nt, synthetic construct
  source 1..22: mol_type = other RNA
ttagagtcgagcaacggcacga

SEQ ID NO: 7654 - RNA, 22 nt, synthetic construct
  source 1..22: mol_type = other RNA
ttagtcgccaacaccgctactg

SEQ ID NO: 7655 - RNA, 22 nt, synthetic construct
  source 1..22: mol_type = other RNA
ttcaagcattcggaggagacat

SEQ ID NO: 7656 - RNA, 22 nt, synthetic construct
  source 1..22: mol_type = other RNA
ttcaggatcacgcccagcccaa

SEQ ID NO: 7657 - RNA, 22 nt, synthetic construct
  source 1..22: mol_type = other RNA
ttcccgctcgccttctccaagg

SEQ ID NO: 7658 - RNA, 22 nt, synthetic construct
  source 1..22: mol_type = other RNA
ttccttcgccaggttcaggatc

SEQ ID NO: 7659 - RNA, 22 nt, synthetic construct
  source 1..22: mol_type = other RNA
ttcgccaggttcaggatcacgc

SEQ ID NO: 7660 - RNA, 22 nt, synthetic construct
  source 1..22: mol_type = other RNA
ttcgcccgctgtctggtggacg

SEQ ID NO: 7661 - RNA, 22 nt, synthetic construct
  source 1..22: mol_type = other RNA
ttcgcgttccttcgccaggttc

SEQ ID NO: 7662 - RNA, 22 nt, synthetic construct
  source 1..22: mol_type = other RNA
ttcggaggagacatgccagagg

SEQ ID NO: 7663 - RNA, 22 nt, synthetic construct
  source 1..22: mol_type = other RNA
ttcggctgcacgcctgcctcgc

SEQ ID NO: 7664 - RNA, 22 nt, synthetic construct
  source 1..22: mol_type = other RNA
ttctacctctgcgccgaggctg

SEQ ID NO: 7665 - RNA, 22 nt, synthetic construct
  source 1..22: mol_type = other RNA
ttctccaaggaggacgagctgc

SEQ ID NO: 7666 - RNA, 22 nt, synthetic construct
  source 1..22: mol_type = other RNA
ttctctaccatgcgtcgctgca

SEQ ID NO: 7667 - RNA, 22 nt, synthetic construct
  source 1..22: mol_type = other RNA
ttgaacatgtgctccaagatgc

SEQ ID NO: 7668 - RNA, 22 nt, synthetic construct
  source 1..22: mol_type = other RNA
ttgatggcagcctcggcgcaga

SEQ ID NO: 7669 - RNA, 22 nt, synthetic construct
  source 1..22: mol_type = other RNA
ttgcaggctcttgatggcagcc

SEQ ID NO: 7670 - RNA, 22 nt, synthetic construct
  source 1..22: mol_type = other RNA
ttgcccagcgccagcgcgcagt

SEQ ID NO: 7671 - RNA, 22 nt, synthetic construct
  source 1..22: mol_type = other RNA
ttgccttgcaggctcttgatgg

SEQ ID NO: 7672 - RNA, 22 nt, synthetic construct
  source 1..22: mol_type = other RNA
ttgctcgactctaaccgcttgg

SEQ ID NO: 7673 - RNA, 22 nt, synthetic construct
  source 1..22: mol_type = other RNA
ttggagaaggcgagcgggaaga

SEQ ID NO: 7674 - RNA, 22 nt, synthetic construct
  source 1..22: mol_type = other RNA
ttggagcacatgttcaagcatt

SEQ ID NO: 7675 - RNA, 22 nt, synthetic construct
  source 1..22: mol_type = other RNA
ttggaggcgcagtgcatcgggg

SEQ ID NO: 7676 - RNA, 22 nt, synthetic construct
  source 1..22: mol_type = other RNA
ttggcgactaacaaggaggtgg

SEQ ID NO: 7677 - RNA, 22 nt, synthetic construct
  source 1..22: mol_type = other RNA
ttgggctgggcgtgatcctgaa

SEQ ID NO: 7678 - RNA, 22 nt, synthetic construct
  source 1..22: mol_type = other RNA
ttggtcttgccttgcaggctct

SEQ ID NO: 7679 - RNA, 22 nt, synthetic construct
  source 1..22: mol_type = other RNA
ttggtgccgccgcacggacccc

SEQ ID NO: 7680 - RNA, 22 nt, synthetic construct
  source 1..22: mol_type = other RNA
ttgtggcctcgctggaccctgg

SEQ ID NO: 7681 - RNA, 22 nt, synthetic construct
  source 1..22: mol_type = other RNA
ttgtgtcgctggcgtccaccag

SEQ ID NO: 7682 - RNA, 22 nt, synthetic construct
  source 1..22: mol_type = other RNA
ttgttagtcgccaacaccgcta

SEQ ID NO: 7683 - RNA, 22 nt, synthetic construct
  source 1..22: mol_type = other RNA
tttctacctctgcgccgaggct

SEQ ID NO: 7684 - RNA, 20 nt, synthetic construct
  source 1..20: mol_type = other RNA
aaaccaggcgtttcaggctc

SEQ ID NO: 7685 - RNA, 20 nt, synthetic construct
  source 1..20: mol_type = other RNA
aaaccgatctgctgcagcca

SEQ ID NO: 7686 - RNA, 20 nt, synthetic construct
  source 1..20: mol_type = other RNA
aaacgcctggtttcctactc

SEQ ID NO: 7687 - RNA, 20 nt, synthetic construct
  source 1..20: mol_type = other RNA
aaccaggcgtttcaggctct

SEQ ID NO: 7688 - RNA, 20 nt, synthetic construct
  source 1..20: mol_type = other RNA
aaccgatctgctgcagccac

SEQ ID NO: 7689 - RNA, 20 nt, synthetic construct
  source 1..20: mol_type = other RNA
aacctcggcctccttccagc

SEQ ID NO: 7690 - RNA, 20 nt, synthetic construct
  source 1..20: mol_type = other RNA
aacgcctggtttcctactct

SEQ ID NO: 7691 - RNA, 20 nt, synthetic construct
  source 1..20: mol_type = other RNA
aagcgcgcgctgcgcctgct

SEQ ID NO: 7692 - RNA, 20 nt, synthetic construct
  source 1..20: mol_type = other RNA
aagctctcgcagtacttgga

SEQ ID NO: 7693 - RNA, 20 nt, synthetic construct
  source 1..20: mol_type = other RNA
aaggaggccgaggttcagac

SEQ ID NO: 7694 - RNA, 20 nt, synthetic construct
  source 1..20: mol_type = other RNA
aagtactgcgagagcttccg

SEQ ID NO: 7695 - RNA, 20 nt, synthetic construct
  source 1..20: mol_type = other RNA
aagtcggcgctggccaagcg

SEQ ID NO: 7696 - RNA, 20 nt, synthetic construct
  source 1..20: mol_type = other RNA
aatggcactaagtcggcgct

SEQ ID NO: 7697 - RNA, 20 nt, synthetic construct
  source 1..20: mol_type = other RNA
acatcggcgccatccagagc

SEQ ID NO: 7698 - RNA, 20 nt, synthetic construct
  source 1..20: mol_type = other RNA
accaatggcactaagtcggc

SEQ ID NO: 7699 - RNA, 20 nt, synthetic construct
  source 1..20: mol_type = other RNA
accaggcgtttcaggctctg

SEQ ID NO: 7700 - RNA, 20 nt, synthetic construct
  source 1..20: mol_type = other RNA
acccggaagctctcgcagta

SEQ ID NO: 7701 - RNA, 20 nt, synthetic construct
  source 1..20: mol_type = other RNA
accgatctgctgcagccacg

SEQ ID NO: 7702 - RNA, 20 nt, synthetic construct
  source 1..20: mol_type = other RNA
acctcctcgcccagcaggcg

SEQ ID NO: 7703 - RNA, 20 nt, synthetic construct
  source 1..20: mol_type = other RNA
acctcggcctccttccagct

SEQ ID NO: 7704 - RNA, 20 nt, synthetic construct
  source 1..20: mol_type = other RNA
acgcctggtttcctactcta

SEQ ID NO: 7705 - RNA, 20 nt, synthetic construct
  source 1..20: mol_type = other RNA
acgcgactctacccggaagc

SEQ ID NO: 7706 - RNA, 20 nt, synthetic construct
  source 1..20: mol_type = other RNA
acggagggcaggatgggccg

SEQ ID NO: 7707 - RNA, 20 nt, synthetic construct
  source 1..20: mol_type = other RNA
acggcccatcctgccctccg

SEQ ID NO: 7708 - RNA, 20 nt, synthetic construct
  source 1..20: mol_type = other RNA
acgtctgaacctcggcctcc

SEQ ID NO: 7709 - RNA, 20 nt, synthetic construct
  source 1..20: mol_type = other RNA
acgtggctgcagcagatcgg

SEQ ID NO: 7710 - RNA, 20 nt, synthetic construct
  source 1..20: mol_type = other RNA
actaagtcggcgctggccaa

SEQ ID NO: 7711 - RNA, 20 nt, synthetic construct
  source 1..20: mol_type = other RNA
actctaccaatggcactaag

SEQ ID NO: 7712 - RNA, 20 nt, synthetic construct
  source 1..20: mol_type = other RNA
actctacccggaagctctcg

SEQ ID NO: 7713 - RNA, 20 nt, synthetic construct
  source 1..20: mol_type = other RNA
actgcgagagcttccgggta

SEQ ID NO: 7714 - RNA, 20 nt, synthetic construct
  source 1..20: mol_type = other RNA
acttagtgccattggtagag

SEQ ID NO: 7715 - RNA, 20 nt, synthetic construct
  source 1..20: mol_type = other RNA
acttggagaaaccgatctgc

SEQ ID NO: 7716 - RNA, 20 nt, synthetic construct
  source 1..20: mol_type = other RNA
agaaaccgatctgctgcagc

SEQ ID NO: 7717 - RNA, 20 nt, synthetic construct
  source 1..20: mol_type = other RNA
agacgtggctgcagcagatc

SEQ ID NO: 7718 - RNA, 20 nt, synthetic construct
  source 1..20: mol_type = other RNA
agagcctgaaacgcctggtt

SEQ ID NO: 7719 - RNA, 20 nt, synthetic construct
  source 1..20: mol_type = other RNA
agagcttccgggtagagtcg

SEQ ID NO: 7720 - RNA, 20 nt, synthetic construct
  source 1..20: mol_type = other RNA
agagtaggaaaccaggcgtt

SEQ ID NO: 7721 - RNA, 20 nt, synthetic construct
  source 1..20: mol_type = other RNA
agatcggtttctccaagtac

SEQ ID NO: 7722 - RNA, 20 nt, synthetic construct
  source 1..20: mol_type = other RNA
agcagatcggtttctccaag

SEQ ID NO: 7723 - RNA, 20 nt, synthetic construct
  source 1..20: mol_type = other RNA
agcaggcgcagcgcgcgctt

SEQ ID NO: 7724 - RNA, 20 nt, synthetic construct
  source 1..20: mol_type = other RNA
agccacgtctgaacctcggc

SEQ ID NO: 7725 - RNA, 20 nt, synthetic construct
  source 1..20: mol_type = other RNA
agcctgaaacgcctggtttc

SEQ ID NO: 7726 - RNA, 20 nt, synthetic construct
  source 1..20: mol_type = other RNA
agcgacatcggcgccatcca

SEQ ID NO: 7727 - RNA, 20 nt, synthetic construct
  source 1..20: mol_type = other RNA
agcgccgacttagtgccatt

SEQ ID NO: 7728 - RNA, 20 nt, synthetic construct
  source 1..20: mol_type = other RNA
agcgcgcgctgcgcctgctg

SEQ ID NO: 7729 - RNA, 20 nt, synthetic construct
  source 1..20: mol_type = other RNA
agcgcgcgcttggccagcgc

SEQ ID NO: 7730 - RNA, 20 nt, synthetic construct
  source 1..20: mol_type = other RNA
agctctcgcagtacttggag

SEQ ID NO: 7731 - RNA, 20 nt, synthetic construct
  source 1..20: mol_type = other RNA
agctggaaggaggccgaggt

SEQ ID NO: 7732 - RNA, 20 nt, synthetic construct
  source 1..20: mol_type = other RNA
agctgggcacggagggcagg

SEQ ID NO: 7733 - RNA, 20 nt, synthetic construct
  source 1..20: mol_type = other RNA
agcttccgggtagagtcgcg

SEQ ID NO: 7734 - RNA, 20 nt, synthetic construct
  source 1..20: mol_type = other RNA
aggaaaccaggcgtttcagg

SEQ ID NO: 7735 - RNA, 20 nt, synthetic construct
  source 1..20: mol_type = other RNA
aggaggccgaggttcagacg

SEQ ID NO: 7736 - RNA, 20 nt, synthetic construct
  source 1..20: mol_type = other RNA
aggaggtgccacggcccatc

SEQ ID NO: 7737 - RNA, 20 nt, synthetic construct
  source 1..20: mol_type = other RNA
aggatgggccgtggcacctc

SEQ ID NO: 7738 - RNA, 20 nt, synthetic construct
  source 1..20: mol_type = other RNA
aggccgaggttcagacgtgg

SEQ ID NO: 7739 - RNA, 20 nt, synthetic construct
  source 1..20: mol_type = other RNA
aggcgcagcgcgcgcttggc

SEQ ID NO: 7740 - RNA, 20 nt, synthetic construct
  source 1..20: mol_type = other RNA
aggcgtatcccacgcgactc

SEQ ID NO: 7741 - RNA, 20 nt, synthetic construct
  source 1..20: mol_type = other RNA
aggcgtttcaggctctggat

SEQ ID NO: 7742 - RNA, 20 nt, synthetic construct
  source 1..20: mol_type = other RNA
aggctctggatggcgccgat

SEQ ID NO: 7743 - RNA, 20 nt, synthetic construct
  source 1..20: mol_type = other RNA
agggcaggatgggccgtggc

SEQ ID NO: 7744 - RNA, 20 nt, synthetic construct
  source 1..20: mol_type = other RNA
aggtgccacggcccatcctg

SEQ ID NO: 7745 - RNA, 20 nt, synthetic construct
  source 1..20: mol_type = other RNA
aggttcagacgtggctgcag

SEQ ID NO: 7746 - RNA, 20 nt, synthetic construct
  source 1..20: mol_type = other RNA
agtactgcgagagcttccgg

SEQ ID NO: 7747 - RNA, 20 nt, synthetic construct
  source 1..20: mol_type = other RNA
agtacttggagaaaccgatc

SEQ ID NO: 7748 - RNA, 20 nt, synthetic construct
  source 1..20: mol_type = other RNA
agtaggaaaccaggcgtttc

SEQ ID NO: 7749 - RNA, 20 nt, synthetic construct
  source 1..20: mol_type = other RNA
agtcggcgctggccaagcgc

SEQ ID NO: 7750 - RNA, 20 nt, synthetic construct
  source 1..20: mol_type = other RNA
agtgccattggtagagtagg

SEQ ID NO: 7751 - RNA, 20 nt, synthetic construct
  source 1..20: mol_type = other RNA
atccagagcctgaaacgcct

SEQ ID NO: 7752 - RNA, 20 nt, synthetic construct
  source 1..20: mol_type = other RNA
atcccacgcgactctacccg

SEQ ID NO: 7753 - RNA, 20 nt, synthetic construct
  source 1..20: mol_type = other RNA
atcctgccctccgtgcccag

SEQ ID NO: 7754 - RNA, 20 nt, synthetic construct
  source 1..20: mol_type = other RNA
atcggcgccatccagagcct

SEQ ID NO: 7755 - RNA, 20 nt, synthetic construct
  source 1..20: mol_type = other RNA
atcggtttctccaagtactg

SEQ ID NO: 7756 - RNA, 20 nt, synthetic construct
  source 1..20: mol_type = other RNA
atctgctgcagccacgtctg

SEQ ID NO: 7757 - RNA, 20 nt, synthetic construct
  source 1..20: mol_type = other RNA
atggcactaagtcggcgctg

SEQ ID NO: 7758 - RNA, 20 nt, synthetic construct
  source 1..20: mol_type = other RNA
atgggccgtggcacctcctc

SEQ ID NO: 7759 - RNA, 20 nt, synthetic construct
  source 1..20: mol_type = other RNA
attggtagagtaggaaacca

SEQ ID NO: 7760 - RNA, 20 nt, synthetic construct
  source 1..20: mol_type = other RNA
caagcgcgcgctgcgcctgc

SEQ ID NO: 7761 - RNA, 20 nt, synthetic construct
  source 1..20: mol_type = other RNA
caagtactgcgagagcttcc

SEQ ID NO: 7762 - RNA, 20 nt, synthetic construct
  source 1..20: mol_type = other RNA
caatggcactaagtcggcgc

SEQ ID NO: 7763 - RNA, 20 nt, synthetic construct
  source 1..20: mol_type = other RNA
cacctcctcgcccagcaggc

SEQ ID NO: 7764 - RNA, 20 nt, synthetic construct
  source 1..20: mol_type = other RNA
cacgcgactctacccggaag

SEQ ID NO: 7765 - RNA, 20 nt, synthetic construct
  source 1..20: mol_type = other RNA
cacggagggcaggatgggcc

SEQ ID NO: 7766 - RNA, 20 nt, synthetic construct
  source 1..20: mol_type = other RNA
cacggcccatcctgccctcc

SEQ ID NO: 7767 - RNA, 20 nt, synthetic construct
  source 1..20: mol_type = other RNA
cacgtctgaacctcggcctc

SEQ ID NO: 7768 - RNA, 20 nt, synthetic construct
  source 1..20: mol_type = other RNA
cactaagtcggcgctggcca

SEQ ID NO: 7769 - RNA, 20 nt, synthetic construct
  source 1..20: mol_type = other RNA
cagacgtggctgcagcagat

SEQ ID NO: 7770 - RNA, 20 nt, synthetic construct
  source 1..20: mol_type = other RNA
cagagcctgaaacgcctggt

SEQ ID NO: 7771 - RNA, 20 nt, synthetic construct
  source 1..20: mol_type = other RNA
cagatcggtttctccaagta

SEQ ID NO: 7772 - RNA, 20 nt, synthetic construct
  source 1..20: mol_type = other RNA
cagcagatcggtttctccaa

SEQ ID NO: 7773 - RNA, 20 nt, synthetic construct
  source 1..20: mol_type = other RNA
cagcaggcgcagcgcgcgct

SEQ ID NO: 7774 - RNA, 20 nt, synthetic construct
  source 1..20: mol_type = other RNA
cagccacgtctgaacctcgg

SEQ ID NO: 7775 - RNA, 20 nt, synthetic construct
  source 1..20: mol_type = other RNA
cagcgacatcggcgccatcc

SEQ ID NO: 7776 - RNA, 20 nt, synthetic construct
  source 1..20: mol_type = other RNA
cagcgccgacttagtgccat

SEQ ID NO: 7777 - RNA, 20 nt, synthetic construct
  source 1..20: mol_type = other RNA
cagcgcgcgcttggccagcg

SEQ ID NO: 7778 - RNA, 20 nt, synthetic construct
  source 1..20: mol_type = other RNA
cagctggaaggaggccgagg

SEQ ID NO: 7779 - RNA, 20 nt, synthetic construct
  source 1..20: mol_type = other RNA
cagctgggcacggagggcag

SEQ ID NO: 7780 - RNA, 20 nt, synthetic construct
  source 1..20: mol_type = other RNA
caggatgggccgtggcacct

SEQ ID NO: 7781 - RNA, 20 nt, synthetic construct
  source 1..20: mol_type = other RNA
caggcgcagcgcgcgcttgg

SEQ ID NO: 7782 - RNA, 20 nt, synthetic construct
  source 1..20: mol_type = other RNA
caggcgtttcaggctctgga

SEQ ID NO: 7783 - RNA, 20 nt, synthetic construct
  source 1..20: mol_type = other RNA
caggctctggatggcgccga

SEQ ID NO: 7784 - RNA, 20 nt, synthetic construct
  source 1..20: mol_type = other RNA
cagtacttggagaaaccgat

SEQ ID NO: 7785 - RNA, 20 nt, synthetic construct
  source 1..20: mol_type = other RNA
catccagagcctgaaacgcc

SEQ ID NO: 7786 - RNA, 20 nt, synthetic construct
  source 1..20: mol_type = other RNA
catcctgccctccgtgccca

SEQ ID NO: 7787 - RNA, 20 nt, synthetic construct
  source 1..20: mol_type = other RNA
catcggcgccatccagagcc

SEQ ID NO: 7788 - RNA, 20 nt, synthetic construct
  source 1..20: mol_type = other RNA
cattggtagagtaggaaacc

SEQ ID NO: 7789 - RNA, 20 nt, synthetic construct
  source 1..20: mol_type = other RNA
ccaagcgcgcgctgcgcctg

SEQ ID NO: 7790 - RNA, 20 nt, synthetic construct
  source 1..20: mol_type = other RNA
ccaagtactgcgagagcttc

SEQ ID NO: 7791 - RNA, 20 nt, synthetic construct
  source 1..20: mol_type = other RNA
ccaatggcactaagtcggcg

SEQ ID NO: 7792 - RNA, 20 nt, synthetic construct
  source 1..20: mol_type = other RNA
ccacgcgactctacccggaa

SEQ ID NO: 7793 - RNA, 20 nt, synthetic construct
  source 1..20: mol_type = other RNA
ccacggcccatcctgccctc

SEQ ID NO: 7794 - RNA, 20 nt, synthetic construct
  source 1..20: mol_type = other RNA
ccacgtctgaacctcggcct

SEQ ID NO: 7795 - RNA, 20 nt, synthetic construct
  source 1..20: mol_type = other RNA
ccagagcctgaaacgcctgg

SEQ ID NO: 7796 - RNA, 20 nt, synthetic construct
  source 1..20: mol_type = other RNA
ccagcaggcgcagcgcgcgc

SEQ ID NO: 7797 - RNA, 20 nt, synthetic construct
  source 1..20: mol_type = other RNA
ccagcgccgacttagtgcca

SEQ ID NO: 7798 - RNA, 20 nt, synthetic construct
  source 1..20: mol_type = other RNA
ccagctggaaggaggccgag

SEQ ID NO: 7799 - RNA, 20 nt, synthetic construct
  source 1..20: mol_type = other RNA
ccagctgggcacggagggca

SEQ ID NO: 7800 - RNA, 20 nt, synthetic construct
  source 1..20: mol_type = other RNA
ccaggcgtttcaggctctgg

SEQ ID NO: 7801 - RNA, 20 nt, synthetic construct
  source 1..20: mol_type = other RNA
ccatccagagcctgaaacgc

SEQ ID NO: 7802 - RNA, 20 nt, synthetic construct
  source 1..20: mol_type = other RNA
ccatcctgccctccgtgccc

SEQ ID NO: 7803 - RNA, 20 nt, synthetic construct
  source 1..20: mol_type = other RNA
ccattggtagagtaggaaac

SEQ ID NO: 7804 - RNA, 20 nt, synthetic construct
  source 1..20: mol_type = other RNA
cccacgcgactctacccgga

SEQ ID NO: 7805 - RNA, 20 nt, synthetic construct
  source 1..20: mol_type = other RNA
cccagcaggcgcagcgcgcg

SEQ ID NO: 7806 - RNA, 20 nt, synthetic construct
  source 1..20: mol_type = other RNA
cccagctggaaggaggccga

SEQ ID NO: 7807 - RNA, 20 nt, synthetic construct
  source 1..20: mol_type = other RNA
cccatcctgccctccgtgcc

SEQ ID NO: 7808 - RNA, 20 nt, synthetic construct
  source 1..20: mol_type = other RNA
cccggaagctctcgcagtac

SEQ ID NO: 7809 - RNA, 20 nt, synthetic construct
  source 1..20: mol_type = other RNA
ccctccgtgcccagctggaa

SEQ ID NO: 7810 - RNA, 20 nt, synthetic construct
  source 1..20: mol_type = other RNA
ccgacttagtgccattggta

SEQ ID NO: 7811 - RNA, 20 nt, synthetic construct
  source 1..20: mol_type = other RNA
ccgaggttcagacgtggctg

SEQ ID NO: 7812 - RNA, 20 nt, synthetic construct
  source 1..20: mol_type = other RNA
ccgatctgctgcagccacgt

SEQ ID NO: 7813 - RNA, 20 nt, synthetic construct
  source 1..20: mol_type = other RNA
ccggaagctctcgcagtact

SEQ ID NO: 7814 - RNA, 20 nt, synthetic construct
  source 1..20: mol_type = other RNA
ccgggtagagtcgcgtggga

SEQ ID NO: 7815 - RNA, 20 nt, synthetic construct
  source 1..20: mol_type = other RNA
ccgtgcccagctggaaggag

SEQ ID NO: 7816 - RNA, 20 nt, synthetic construct
  source 1..20: mol_type = other RNA
ccgtggcacctcctcgccca

SEQ ID NO: 7817 - RNA, 20 nt, synthetic construct
  source 1..20: mol_type = other RNA
cctactctaccaatggcact

SEQ ID NO: 7818 - RNA, 20 nt, synthetic construct
  source 1..20: mol_type = other RNA
cctccgtgcccagctggaag

SEQ ID NO: 7819 - RNA, 20 nt, synthetic construct
  source 1..20: mol_type = other RNA
cctcctcgcccagcaggcgc

SEQ ID NO: 7820 - RNA, 20 nt, synthetic construct
  source 1..20: mol_type = other RNA
cctccttccagctgggcacg

SEQ ID NO: 7821 - RNA, 20 nt, synthetic construct
  source 1..20: mol_type = other RNA
cctcgcccagcaggcgcagc

SEQ ID NO: 7822 - RNA, 20 nt, synthetic construct
  source 1..20: mol_type = other RNA
cctcggcctccttccagctg

SEQ ID NO: 7823 - RNA, 20 nt, synthetic construct
  source 1..20: mol_type = other RNA
cctgaaacgcctggtttcct

SEQ ID NO: 7824 - RNA, 20 nt, synthetic construct
  source 1..20: mol_type = other RNA
cctgccctccgtgcccagct

SEQ ID NO: 7825 - RNA, 20 nt, synthetic construct
  source 1..20: mol_type = other RNA
cctgctgggcgaggaggtgc

SEQ ID NO: 7826 - RNA, 20 nt, synthetic construct
  source 1..20: mol_type = other RNA
cctggtttcctactctacca

SEQ ID NO: 7827 - RNA, 20 nt, synthetic construct
  source 1..20: mol_type = other RNA
ccttccagctgggcacggag

SEQ ID NO: 7828 - RNA, 20 nt, synthetic construct
  source 1..20: mol_type = other RNA
cgacatcggcgccatccaga

SEQ ID NO: 7829 - RNA, 20 nt, synthetic construct
  source 1..20: mol_type = other RNA
cgactctacccggaagctct

SEQ ID NO: 7830 - RNA, 20 nt, synthetic construct
  source 1..20: mol_type = other RNA
cgacttagtgccattggtag

SEQ ID NO: 7831 - RNA, 20 nt, synthetic construct
  source 1..20: mol_type = other RNA
cgagagcttccgggtagagt

SEQ ID NO: 7832 - RNA, 20 nt, synthetic construct
  source 1..20: mol_type = other RNA
cgaggaggtgccacggccca

SEQ ID NO: 7833 - RNA, 20 nt, synthetic construct
  source 1..20: mol_type = other RNA
cgaggttcagacgtggctgc

SEQ ID NO: 7834 - RNA, 20 nt, synthetic construct
  source 1..20: mol_type = other RNA
cgatctgctgcagccacgtc

SEQ ID NO: 7835 - RNA, 20 nt, synthetic construct
  source 1..20: mol_type = other RNA
cgcagcgcgcgcttggccag

SEQ ID NO: 7836 - RNA, 20 nt, synthetic construct
  source 1..20: mol_type = other RNA
cgcagtacttggagaaaccg

SEQ ID NO: 7837 - RNA, 20 nt, synthetic construct
  source 1..20: mol_type = other RNA
cgccatccagagcctgaaac

SEQ ID NO: 7838 - RNA, 20 nt, synthetic construct
  source 1..20: mol_type = other RNA
cgcccagcaggcgcagcgcg

SEQ ID NO: 7839 - RNA, 20 nt, synthetic construct
  source 1..20: mol_type = other RNA
cgccgacttagtgccattgg

SEQ ID NO: 7840 - RNA, 20 nt, synthetic construct
  source 1..20: mol_type = other RNA
cgcctgctgggcgaggaggt

SEQ ID NO: 7841 - RNA, 20 nt, synthetic construct
  source 1..20: mol_type = other RNA
cgcctggtttcctactctac

SEQ ID NO: 7842 - RNA, 20 nt, synthetic construct
  source 1..20: mol_type = other RNA
cgcgactctacccggaagct

SEQ ID NO: 7843 - RNA, 20 nt, synthetic construct
  source 1..20: mol_type = other RNA
cgcgcgctgcgcctgctggg

SEQ ID NO: 7844 - RNA, 20 nt, synthetic construct
  source 1..20: mol_type = other RNA
cgcgcgcttggccagcgccg

SEQ ID NO: 7845 - RNA, 20 nt, synthetic construct
  source 1..20: mol_type = other RNA
cgcgctgcgcctgctgggcg

SEQ ID NO: 7846 - RNA, 20 nt, synthetic construct
  source 1..20: mol_type = other RNA
cgcgcttggccagcgccgac

SEQ ID NO: 7847 - RNA, 20 nt, synthetic construct
  source 1..20: mol_type = other RNA
cgctgcgcctgctgggcgag

SEQ ID NO: 7848 - RNA, 20 nt, synthetic construct
  source 1..20: mol_type = other RNA
cgctggccaagcgcgcgctg

SEQ ID NO: 7849 - RNA, 20 nt, synthetic construct
  source 1..20: mol_type = other RNA
cgcttggccagcgccgactt

SEQ ID NO: 7850 - RNA, 20 nt, synthetic construct
  source 1..20: mol_type = other RNA
cggaagctctcgcagtactt

SEQ ID NO: 7851 - RNA, 20 nt, synthetic construct
  source 1..20: mol_type = other RNA
cggagggcaggatgggccgt

SEQ ID NO: 7852 - RNA, 20 nt, synthetic construct
  source 1..20: mol_type = other RNA
cggcccatcctgccctccgt

SEQ ID NO: 7853 - RNA, 20 nt, synthetic construct
  source 1..20: mol_type = other RNA
cggcctccttccagctgggc

SEQ ID NO: 7854 - RNA, 20 nt, synthetic construct
  source 1..20: mol_type = other RNA
cggcgccatccagagcctga

SEQ ID NO: 7855 - RNA, 20 nt, synthetic construct
  source 1..20: mol_type = other RNA
cggcgctggccaagcgcgcg

SEQ ID NO: 7856 - RNA, 20 nt, synthetic construct
  source 1..20: mol_type = other RNA
cgggtagagtcgcgtgggat

SEQ ID NO: 7857 - RNA, 20 nt, synthetic construct
  source 1..20: mol_type = other RNA
cggtttctccaagtactgcg

SEQ ID NO: 7858 - RNA, 20 nt, synthetic construct
  source 1..20: mol_type = other RNA
cgtatcccacgcgactctac

SEQ ID NO: 7859 - RNA, 20 nt, synthetic construct
  source 1..20: mol_type = other RNA
cgtctgaacctcggcctcct

SEQ ID NO: 7860 - RNA, 20 nt, synthetic construct
  source 1..20: mol_type = other RNA
cgtgcccagctggaaggagg

SEQ ID NO: 7861 - RNA, 20 nt, synthetic construct
  source 1..20: mol_type = other RNA
cgtggcacctcctcgcccag

SEQ ID NO: 7862 - RNA, 20 nt, synthetic construct
  source 1..20: mol_type = other RNA
cgtggctgcagcagatcggt

SEQ ID NO: 7863 - RNA, 20 nt, synthetic construct
  source 1..20: mol_type = other RNA
cgtttcaggctctggatggc

SEQ ID NO: 7864 - RNA, 20 nt, synthetic construct
  source 1..20: mol_type = other RNA
ctaagtcggcgctggccaag

SEQ ID NO: 7865 - RNA, 20 nt, synthetic construct
  source 1..20: mol_type = other RNA
ctaccaatggcactaagtcg

SEQ ID NO: 7866 - RNA, 20 nt, synthetic construct
  source 1..20: mol_type = other RNA
ctacccggaagctctcgcag

SEQ ID NO: 7867 - RNA, 20 nt, synthetic construct
  source 1..20: mol_type = other RNA
ctactctaccaatggcacta

SEQ ID NO: 7868 - RNA, 20 nt, synthetic construct
  source 1..20: mol_type = other RNA
ctccaagtactgcgagagct

SEQ ID NO: 7869 - RNA, 20 nt, synthetic construct
  source 1..20: mol_type = other RNA
ctccgtgcccagctggaagg

SEQ ID NO: 7870 - RNA, 20 nt, synthetic construct
  source 1..20: mol_type = other RNA
ctcctcgcccagcaggcgca

SEQ ID NO: 7871 - RNA, 20 nt, synthetic construct
  source 1..20: mol_type = other RNA
ctccttccagctgggcacgg

SEQ ID NO: 7872 - RNA, 20 nt, synthetic construct
  source 1..20: mol_type = other RNA
ctcgcagtacttggagaaac

SEQ ID NO: 7873 - RNA, 20 nt, synthetic construct
  source 1..20: mol_type = other RNA
ctcgcccagcaggcgcagcg

SEQ ID NO: 7874 - RNA, 20 nt, synthetic construct
  source 1..20: mol_type = other RNA
ctcggcctccttccagctgg

SEQ ID NO: 7875 - RNA, 20 nt, synthetic construct
  source 1..20: mol_type = other RNA
ctctaccaatggcactaagt

SEQ ID NO: 7876 - RNA, 20 nt, synthetic construct
  source 1..20: mol_type = other RNA
ctctacccggaagctctcgc

SEQ ID NO: 7877 - RNA, 20 nt, synthetic construct
  source 1..20: mol_type = other RNA
ctctcgcagtacttggagaa

SEQ ID NO: 7878 - RNA, 20 nt, synthetic construct
  source 1..20: mol_type = other RNA
ctctggatggcgccgatgtc

SEQ ID NO: 7879 - RNA, 20 nt, synthetic construct
  source 1..20: mol_type = other RNA
ctgaaacgcctggtttccta

SEQ ID NO: 7880 - RNA, 20 nt, synthetic construct
  source 1..20: mol_type = other RNA
ctgaacctcggcctccttcc

SEQ ID NO: 7881 - RNA, 20 nt, synthetic construct
  source 1..20: mol_type = other RNA
ctgcagcagatcggtttctc

SEQ ID NO: 7882 - RNA, 20 nt, synthetic construct
  source 1..20: mol_type = other RNA
ctgcagccacgtctgaacct

SEQ ID NO: 7883 - RNA, 20 nt, synthetic construct
  source 1..20: mol_type = other RNA
ctgccctccgtgcccagctg

SEQ ID NO: 7884 - RNA, 20 nt, synthetic construct
  source 1..20: mol_type = other RNA
ctgcgagagcttccgggtag

SEQ ID NO: 7885 - RNA, 20 nt, synthetic construct
  source 1..20: mol_type = other RNA
ctgcgcctgctgggcgagga

SEQ ID NO: 7886 - RNA, 20 nt, synthetic construct
  source 1..20: mol_type = other RNA
ctgctgcagccacgtctgaa

SEQ ID NO: 7887 - RNA, 20 nt, synthetic construct
  source 1..20: mol_type = other RNA
ctgctgggcgaggaggtgcc

SEQ ID NO: 7888 - RNA, 20 nt, synthetic construct
  source 1..20: mol_type = other RNA
ctggaaggaggccgaggttc

SEQ ID NO: 7889 - RNA, 20 nt, synthetic construct
  source 1..20: mol_type = other RNA
ctggccaagcgcgcgctgcg

SEQ ID NO: 7890 - RNA, 20 nt, synthetic construct
  source 1..20: mol_type = other RNA
ctgggcacggagggcaggat

SEQ ID NO: 7891 - RNA, 20 nt, synthetic construct
  source 1..20: mol_type = other RNA
ctgggcgaggaggtgccacg

SEQ ID NO: 7892 - RNA, 20 nt, synthetic construct
  source 1..20: mol_type = other RNA
ctggtttcctactctaccaa

SEQ ID NO: 7893 - RNA, 20 nt, synthetic construct
  source 1..20: mol_type = other RNA
cttagtgccattggtagagt

SEQ ID NO: 7894 - RNA, 20 nt, synthetic construct
  source 1..20: mol_type = other RNA
cttccagctgggcacggagg

SEQ ID NO: 7895 - RNA, 20 nt, synthetic construct
  source 1..20: mol_type = other RNA
cttccgggtagagtcgcgtg

SEQ ID NO: 7896 - RNA, 20 nt, synthetic construct
  source 1..20: mol_type = other RNA
cttggagaaaccgatctgct

SEQ ID NO: 7897 - RNA, 20 nt, synthetic construct
  source 1..20: mol_type = other RNA
cttggccagcgccgacttag

SEQ ID NO: 7898 - RNA, 20 nt, synthetic construct
  source 1..20: mol_type = other RNA
gaaaccaggcgtttcaggct

SEQ ID NO: 7899 - RNA, 20 nt, synthetic construct
  source 1..20: mol_type = other RNA
gaaaccgatctgctgcagcc

SEQ ID NO: 7900 - RNA, 20 nt, synthetic construct
  source 1..20: mol_type = other RNA
gaaacgcctggtttcctact

SEQ ID NO: 7901 - RNA, 20 nt, synthetic construct
  source 1..20: mol_type = other RNA
gaacctcggcctccttccag

SEQ ID NO: 7902 - RNA, 20 nt, synthetic construct
  source 1..20: mol_type = other RNA
gaagctctcgcagtacttgg

SEQ ID NO: 7903 - RNA, 20 nt, synthetic construct
  source 1..20: mol_type = other RNA
gaaggaggccgaggttcaga

SEQ ID NO: 7904 - RNA, 20 nt, synthetic construct
  source 1..20: mol_type = other RNA
gacatcggcgccatccagag

SEQ ID NO: 7905 - RNA, 20 nt, synthetic construct
  source 1..20: mol_type = other RNA
gacgtggctgcagcagatcg

SEQ ID NO: 7906 - RNA, 20 nt, synthetic construct
  source 1..20: mol_type = other RNA
gactctacccggaagctctc

SEQ ID NO: 7907 - RNA, 20 nt, synthetic construct
  source 1..20: mol_type = other RNA
gacttagtgccattggtaga

SEQ ID NO: 7908 - RNA, 20 nt, synthetic construct
  source 1..20: mol_type = other RNA
gagaaaccgatctgctgcag

SEQ ID NO: 7909 - RNA, 20 nt, synthetic construct
  source 1..20: mol_type = other RNA
gagagcttccgggtagagtc

SEQ ID NO: 7910 - RNA, 20 nt, synthetic construct
  source 1..20: mol_type = other RNA
gagcctgaaacgcctggttt

SEQ ID NO: 7911 - RNA, 20 nt, synthetic construct
  source 1..20: mol_type = other RNA
gagcttccgggtagagtcgc

SEQ ID NO: 7912 - RNA, 20 nt, synthetic construct
  source 1..20: mol_type = other RNA
gaggaggtgccacggcccat

SEQ ID NO: 7913 - RNA, 20 nt, synthetic construct
  source 1..20: mol_type = other RNA
gaggccgaggttcagacgtg

SEQ ID NO: 7914 - RNA, 20 nt, synthetic construct
  source 1..20: mol_type = other RNA
gaggcgtatcccacgcgact

SEQ ID NO: 7915 - RNA, 20 nt, synthetic construct
  source 1..20: mol_type = other RNA
gagggcaggatgggccgtgg

SEQ ID NO: 7916 - RNA, 20 nt, synthetic construct
  source 1..20: mol_type = other RNA
gaggtgccacggcccatcct

SEQ ID NO: 7917 - RNA, 20 nt, synthetic construct
  source 1..20: mol_type = other RNA
gaggttcagacgtggctgca

SEQ ID NO: 7918 - RNA, 20 nt, synthetic construct
  source 1..20: mol_type = other RNA
gagtaggaaaccaggcgttt

SEQ ID NO: 7919 - RNA, 20 nt, synthetic construct
  source 1..20: mol_type = other RNA
gatcggtttctccaagtact

SEQ ID NO: 7920 - RNA, 20 nt, synthetic construct
  source 1..20: mol_type = other RNA
gatctgctgcagccacgtct

SEQ ID NO: 7921 - RNA, 20 nt, synthetic construct
  source 1..20: mol_type = other RNA
gatgggccgtggcacctcct

SEQ ID NO: 7922 - RNA, 20 nt, synthetic construct
  source 1..20: mol_type = other RNA
gcacctcctcgcccagcagg

SEQ ID NO: 7923 - RNA, 20 nt, synthetic construct
  source 1..20: mol_type = other RNA
gcacggagggcaggatgggc

SEQ ID NO: 7924 - RNA, 20 nt, synthetic construct
  source 1..20: mol_type = other RNA
gcactaagtcggcgctggcc

SEQ ID NO: 7925 - RNA, 20 nt, synthetic construct
  source 1..20: mol_type = other RNA
gcagatcggtttctccaagt

SEQ ID NO: 7926 - RNA, 20 nt, synthetic construct
  source 1..20: mol_type = other RNA
gcagcagatcggtttctcca

SEQ ID NO: 7927 - RNA, 20 nt, synthetic construct
  source 1..20: mol_type = other RNA
gcagccacgtctgaacctcg

SEQ ID NO: 7928 - RNA, 20 nt, synthetic construct
  source 1..20: mol_type = other RNA
gcagcgcgcgcttggccagc

SEQ ID NO: 7929 - RNA, 20 nt, synthetic construct
  source 1..20: mol_type = other RNA
gcaggatgggccgtggcacc

SEQ ID NO: 7930 - RNA, 20 nt, synthetic construct
  source 1..20: mol_type = other RNA
gcaggcgcagcgcgcgcttg

SEQ ID NO: 7931 - RNA, 20 nt, synthetic construct
  source 1..20: mol_type = other RNA
gcagtacttggagaaaccga

SEQ ID NO: 7932 - RNA, 20 nt, synthetic construct
  source 1..20: mol_type = other RNA
gccaagcgcgcgctgcgcct

SEQ ID NO: 7933 - RNA, 20 nt, synthetic construct
  source 1..20: mol_type = other RNA
gccacggcccatcctgccct

SEQ ID NO: 7934 - RNA, 20 nt, synthetic construct
  source 1..20: mol_type = other RNA
gccacgtctgaacctcggcc

SEQ ID NO: 7935 - RNA, 20 nt, synthetic construct
  source 1..20: mol_type = other RNA
gccagcgccgacttagtgcc

SEQ ID NO: 7936 - RNA, 20 nt, synthetic construct
  source 1..20: mol_type = other RNA
gccatccagagcctgaaacg

SEQ ID NO: 7937 - RNA, 20 nt, synthetic construct
  source 1..20: mol_type = other RNA
gccattggtagagtaggaaa

SEQ ID NO: 7938 - RNA, 20 nt, synthetic construct
  source 1..20: mol_type = other RNA
gcccagcaggcgcagcgcgc

SEQ ID NO: 7939 - RNA, 20 nt, synthetic construct
  source 1..20: mol_type = other RNA
gcccagctggaaggaggccg

SEQ ID NO: 7940 - RNA, 20 nt, synthetic construct
  source 1..20: mol_type = other RNA
gcccatcctgccctccgtgc

SEQ ID NO: 7941 - RNA, 20 nt, synthetic construct
  source 1..20: mol_type = other RNA
gccctccgtgcccagctgga

SEQ ID NO: 7942 - RNA, 20 nt, synthetic construct
  source 1..20: mol_type = other RNA
gccgacttagtgccattggt

SEQ ID NO: 7943 - RNA, 20 nt, synthetic construct
  source 1..20: mol_type = other RNA
gccgaggttcagacgtggct

SEQ ID NO: 7944 - RNA, 20 nt, synthetic construct
  source 1..20: mol_type = other RNA
gccgtggcacctcctcgccc

SEQ ID NO: 7945 - RNA, 20 nt, synthetic construct
  source 1..20: mol_type = other RNA
gcctccttccagctgggcac

SEQ ID NO: 7946 - RNA, 20 nt, synthetic construct
  source 1..20: mol_type = other RNA
gcctgaaacgcctggtttcc

SEQ ID NO: 7947 - RNA, 20 nt, synthetic construct
  source 1..20: mol_type = other RNA
gcctgctgggcgaggaggtg

SEQ ID NO: 7948 - RNA, 20 nt, synthetic construct
  source 1..20: mol_type = other RNA
gcctggtttcctactctacc

SEQ ID NO: 7949 - RNA, 20 nt, synthetic construct
  source 1..20: mol_type = other RNA
gcgacatcggcgccatccag

SEQ ID NO: 7950 - RNA, 20 nt, synthetic construct
  source 1..20: mol_type = other RNA
gcgactctacccggaagctc

SEQ ID NO: 7951 - RNA, 20 nt, synthetic construct
  source 1..20: mol_type = other RNA
gcgagagcttccgggtagag

SEQ ID NO: 7952 - RNA, 20 nt, synthetic construct
  source 1..20: mol_type = other RNA
gcgaggaggtgccacggccc

SEQ ID NO: 7953 - RNA, 20 nt, synthetic construct
  source 1..20: mol_type = other RNA
gcgcagcgcgcgcttggcca

SEQ ID NO: 7954 - RNA, 20 nt, synthetic construct
  source 1..20: mol_type = other RNA
gcgccatccagagcctgaaa

SEQ ID NO: 7955 - RNA, 20 nt, synthetic construct
  source 1..20: mol_type = other RNA
gcgccgacttagtgccattg

SEQ ID NO: 7956 - RNA, 20 nt, synthetic construct
  source 1..20: mol_type = other RNA
gcgcctgctgggcgaggagg

SEQ ID NO: 7957 - RNA, 20 nt, synthetic construct
  source 1..20: mol_type = other RNA
gcgcgcgctgcgcctgctgg

SEQ ID NO: 7958 - RNA, 20 nt, synthetic construct
  source 1..20: mol_type = other RNA
gcgcgcgcttggccagcgcc

SEQ ID NO: 7959 - RNA, 20 nt, synthetic construct
  source 1..20: mol_type = other RNA
gcgcgctgcgcctgctgggc

SEQ ID NO: 7960 - RNA, 20 nt, synthetic construct
  source 1..20: mol_type = other RNA
gcgcgcttggccagcgccga

SEQ ID NO: 7961 - RNA, 20 nt, synthetic construct
  source 1..20: mol_type = other RNA
gcgctgcgcctgctgggcga

SEQ ID NO: 7962 - RNA, 20 nt, synthetic construct
  source 1..20: mol_type = other RNA
gcgctggccaagcgcgcgct

SEQ ID NO: 7963 - RNA, 20 nt, synthetic construct
  source 1..20: mol_type = other RNA
gcgcttggccagcgccgact

SEQ ID NO: 7964 - RNA, 20 nt, synthetic construct
  source 1..20: mol_type = other RNA
gcgtatcccacgcgactcta

SEQ ID NO: 7965 - RNA, 20 nt, synthetic construct
  source 1..20: mol_type = other RNA
gcgtttcaggctctggatgg

SEQ ID NO: 7966 - RNA, 20 nt, synthetic construct
  source 1..20: mol_type = other RNA
gctctcgcagtacttggaga

SEQ ID NO: 7967 - RNA, 20 nt, synthetic construct
  source 1..20: mol_type = other RNA
gctctggatggcgccgatgt

SEQ ID NO: 7968 - RNA, 20 nt, synthetic construct
  source 1..20: mol_type = other RNA
gctgcagcagatcggtttct

SEQ ID NO: 7969 - RNA, 20 nt, synthetic construct
  source 1..20: mol_type = other RNA
gctgcagccacgtctgaacc

SEQ ID NO: 7970 - RNA, 20 nt, synthetic construct
  source 1..20: mol_type = other RNA
gctgcgcctgctgggcgagg

SEQ ID NO: 7971 - RNA, 20 nt, synthetic construct
  source 1..20: mol_type = other RNA
gctggaaggaggccgaggtt

SEQ ID NO: 7972 - RNA, 20 nt, synthetic construct
  source 1..20: mol_type = other RNA
gctggccaagcgcgcgctgc

SEQ ID NO: 7973 - RNA, 20 nt, synthetic construct
  source 1..20: mol_type = other RNA
gctgggcacggagggcagga

SEQ ID NO: 7974 - RNA, 20 nt, synthetic construct
  source 1..20: mol_type = other RNA
gctgggcgaggaggtgccac

SEQ ID NO: 7975 - RNA, 20 nt, synthetic construct
  source 1..20: mol_type = other RNA
gcttccgggtagagtcgcgt

SEQ ID NO: 7976 - RNA, 20 nt, synthetic construct
  source 1..20: mol_type = other RNA
gcttggccagcgccgactta

SEQ ID NO: 7977 - RNA, 20 nt, synthetic construct
  source 1..20: mol_type = other RNA
ggaaaccaggcgtttcaggc

SEQ ID NO: 7978 - RNA, 20 nt, synthetic construct
  source 1..20: mol_type = other RNA
ggaagctctcgcagtacttg

SEQ ID NO: 7979 - RNA, 20 nt, synthetic construct
  source 1..20: mol_type = other RNA
ggaaggaggccgaggttcag

SEQ ID NO: 7980 - RNA, 20 nt, synthetic construct
  source 1..20: mol_type = other RNA
ggagaaaccgatctgctgca

SEQ ID NO: 7981 - RNA, 20 nt, synthetic construct
  source 1..20: mol_type = other RNA
ggaggccgaggttcagacgt

SEQ ID NO: 7982 - RNA, 20 nt, synthetic construct
  source 1..20: mol_type = other RNA
ggaggcgtatcccacgcgac

SEQ ID NO: 7983 - RNA, 20 nt, synthetic construct
  source 1..20: mol_type = other RNA
ggagggcaggatgggccgtg

SEQ ID NO: 7984 - RNA, 20 nt, synthetic construct
  source 1..20: mol_type = other RNA
ggaggtgccacggcccatcc

SEQ ID NO: 7985 - RNA, 20 nt, synthetic construct
  source 1..20: mol_type = other RNA
ggatgggccgtggcacctcc

SEQ ID NO: 7986 - RNA, 20 nt, synthetic construct
  source 1..20: mol_type = other RNA
ggcacctcctcgcccagcag

SEQ ID NO: 7987 - RNA, 20 nt, synthetic construct
  source 1..20: mol_type = other RNA
ggcacggagggcaggatggg

SEQ ID NO: 7988 - RNA, 20 nt, synthetic construct
  source 1..20: mol_type = other RNA
ggcactaagtcggcgctggc

SEQ ID NO: 7989 - RNA, 20 nt, synthetic construct
  source 1..20: mol_type = other RNA
ggcaggatgggccgtggcac

SEQ ID NO: 7990 - RNA, 20 nt, synthetic construct
  source 1..20: mol_type = other RNA
ggccaagcgcgcgctgcgcc

SEQ ID NO: 7991 - RNA, 20 nt, synthetic construct
  source 1..20: mol_type = other RNA
ggccagcgccgacttagtgc

SEQ ID NO: 7992 - RNA, 20 nt, synthetic construct
  source 1..20: mol_type = other RNA
ggcccatcctgccctccgtg

SEQ ID NO: 7993 - RNA, 20 nt, synthetic construct
  source 1..20: mol_type = other RNA
ggccgaggttcagacgtggc

SEQ ID NO: 7994 - RNA, 20 nt, synthetic construct
  source 1..20: mol_type = other RNA
ggccgtggcacctcctcgcc

SEQ ID NO: 7995 - RNA, 20 nt, synthetic construct
  source 1..20: mol_type = other RNA
ggcctccttccagctgggca

SEQ ID NO: 7996 - RNA, 20 nt, synthetic construct
  source 1..20: mol_type = other RNA
ggcgaggaggtgccacggcc

SEQ ID NO: 7997 - RNA, 20 nt, synthetic construct
  source 1..20: mol_type = other RNA
ggcgcagcgcgcgcttggcc

SEQ ID NO: 7998 - RNA, 20 nt, synthetic construct
  source 1..20: mol_type = other RNA
ggcgccatccagagcctgaa

SEQ ID NO: 7999 - RNA, 20 nt, synthetic construct
  source 1..20: mol_type = other RNA
ggcgctggccaagcgcgcgc

SEQ ID NO: 8000 - RNA, 20 nt, synthetic construct
  source 1..20: mol_type = other RNA
ggcgtatcccacgcgactct

SEQ ID NO: 8001 - RNA, 20 nt, synthetic construct
  source 1..20: mol_type = other RNA
ggcgtttcaggctctggatg

SEQ ID NO: 8002 - RNA, 20 nt, synthetic construct
  source 1..20: mol_type = other RNA
ggctctggatggcgccgatg

SEQ ID NO: 8003 - RNA, 20 nt, synthetic construct
  source 1..20: mol_type = other RNA
ggctgcagcagatcggtttc

SEQ ID NO: 8004 - RNA, 20 nt, synthetic construct
  source 1..20: mol_type = other RNA
gggaggcgtatcccacgcga

SEQ ID NO: 8005 - RNA, 20 nt, synthetic construct
  source 1..20: mol_type = other RNA
gggcacggagggcaggatgg

SEQ ID NO: 8006 - RNA, 20 nt, synthetic construct
  source 1..20: mol_type = other RNA
gggcaggatgggccgtggca

SEQ ID NO: 8007 - RNA, 20 nt, synthetic construct
  source 1..20: mol_type = other RNA
gggccgtggcacctcctcgc

SEQ ID NO: 8008 - RNA, 20 nt, synthetic construct
  source 1..20: mol_type = other RNA
gggcgaggaggtgccacggc

SEQ ID NO: 8009 - RNA, 20 nt, synthetic construct
  source 1..20: mol_type = other RNA
ggggaggcgtatcccacgcg

SEQ ID NO: 8010 - RNA, 20 nt, synthetic construct
  source 1..20: mol_type = other RNA
gggggaggcgtatcccacgc

SEQ ID NO: 8011 - RNA, 20 nt, synthetic construct
  source 1..20: mol_type = other RNA
gggtagagtcgcgtgggata

SEQ ID NO: 8012 - RNA, 20 nt, synthetic construct
  source 1..20: mol_type = other RNA
ggtagagtaggaaaccaggc

SEQ ID NO: 8013 - RNA, 20 nt, synthetic construct
  source 1..20: mol_type = other RNA
ggtagagtcgcgtgggatac

SEQ ID NO: 8014 - RNA, 20 nt, synthetic construct
  source 1..20: mol_type = other RNA
ggtgccacggcccatcctgc

SEQ ID NO: 8015 - RNA, 20 nt, synthetic construct
  source 1..20: mol_type = other RNA
ggttcagacgtggctgcagc

SEQ ID NO: 8016 - RNA, 20 nt, synthetic construct
  source 1..20: mol_type = other RNA
ggtttcctactctaccaatg

SEQ ID NO: 8017 - RNA, 20 nt, synthetic construct
  source 1..20: mol_type = other RNA
ggtttctccaagtactgcga

SEQ ID NO: 8018 - RNA, 20 nt, synthetic construct
  source 1..20: mol_type = other RNA
gtactgcgagagcttccggg

SEQ ID NO: 8019 - RNA, 20 nt, synthetic construct
  source 1..20: mol_type = other RNA
gtacttggagaaaccgatct

SEQ ID NO: 8020 - RNA, 20 nt, synthetic construct
  source 1..20: mol_type = other RNA
gtagagtaggaaaccaggcg

SEQ ID NO: 8021 - RNA, 20 nt, synthetic construct
  source 1..20: mol_type = other RNA
gtagagtcgcgtgggatacg

SEQ ID NO: 8022 - RNA, 20 nt, synthetic construct
  source 1..20: mol_type = other RNA
gtaggaaaccaggcgtttca

SEQ ID NO: 8023 - RNA, 20 nt, synthetic construct
  source 1..20: mol_type = other RNA
gtatcccacgcgactctacc

SEQ ID NO: 8024 - RNA, 20 nt, synthetic construct
  source 1..20: mol_type = other RNA
gtcggcgctggccaagcgcg

SEQ ID NO: 8025 - RNA, 20 nt, synthetic construct
  source 1..20: mol_type = other RNA
gtctgaacctcggcctcctt

SEQ ID NO: 8026 - RNA, 20 nt, synthetic construct
  source 1..20: mol_type = other RNA
gtgccacggcccatcctgcc

SEQ ID NO: 8027 - RNA, 20 nt, synthetic construct
  source 1..20: mol_type = other RNA
gtgccattggtagagtagga

SEQ ID NO: 8028 - RNA, 20 nt, synthetic construct
  source 1..20: mol_type = other RNA
gtgcccagctggaaggaggc

SEQ ID NO: 8029 - RNA, 20 nt, synthetic construct
  source 1..20: mol_type = other RNA
gtggcacctcctcgcccagc

SEQ ID NO: 8030 - RNA, 20 nt, synthetic construct
  source 1..20: mol_type = other RNA
gtggctgcagcagatcggtt

SEQ ID NO: 8031 - RNA, 20 nt, synthetic construct
  source 1..20: mol_type = other RNA
gtgttcagcgacatcggcgc

SEQ ID NO: 8032 - RNA, 20 nt, synthetic construct
  source 1..20: mol_type = other RNA
gttcagacgtggctgcagca

SEQ ID NO: 8033 - RNA, 20 nt, synthetic construct
  source 1..20: mol_type = other RNA
gttcagcgacatcggcgcca

SEQ ID NO: 8034 - RNA, 20 nt, synthetic construct
  source 1..20: mol_type = other RNA
gtttcaggctctggatggcg

SEQ ID NO: 8035 - RNA, 20 nt, synthetic construct
  source 1..20: mol_type = other RNA
gtttcctactctaccaatgg

SEQ ID NO: 8036 - RNA, 20 nt, synthetic construct
  source 1..20: mol_type = other RNA
gtttctccaagtactgcgag

SEQ ID NO: 8037 - RNA, 20 nt, synthetic construct
  source 1..20: mol_type = other RNA
taagtcggcgctggccaagc

SEQ ID NO: 8038 - RNA, 20 nt, synthetic construct
  source 1..20: mol_type = other RNA
taccaatggcactaagtcgg

SEQ ID NO: 8039 - RNA, 20 nt, synthetic construct
  source 1..20: mol_type = other RNA
tacccggaagctctcgcagt

SEQ ID NO: 8040 - RNA, 20 nt, synthetic construct
  source 1..20: mol_type = other RNA
tactctaccaatggcactaa

SEQ ID NO: 8041 - RNA, 20 nt, synthetic construct
  source 1..20: mol_type = other RNA
tactgcgagagcttccgggt

SEQ ID NO: 8042 - RNA, 20 nt, synthetic construct
  source 1..20: mol_type = other RNA
tacttggagaaaccgatctg

SEQ ID NO: 8043 - RNA, 20 nt, synthetic construct
  source 1..20: mol_type = other RNA
tagagtaggaaaccaggcgt

SEQ ID NO: 8044 - RNA, 20 nt, synthetic construct
  source 1..20: mol_type = other RNA
taggaaaccaggcgtttcag

SEQ ID NO: 8045 - RNA, 20 nt, synthetic construct
  source 1..20: mol_type = other RNA
tagtgccattggtagagtag

SEQ ID NO: 8046 - RNA, 20 nt, synthetic construct
  source 1..20: mol_type = other RNA
tatcccacgcgactctaccc

SEQ ID NO: 8047 - RNA, 20 nt, synthetic construct
  source 1..20: mol_type = other RNA
tcagacgtggctgcagcaga

SEQ ID NO: 8048 - RNA, 20 nt, synthetic construct
  source 1..20: mol_type = other RNA
tcagcgacatcggcgccatc

SEQ ID NO: 8049 - RNA, 20 nt, synthetic construct
  source 1..20: mol_type = other RNA
tcaggctctggatggcgccg

SEQ ID NO: 8050 - RNA, 20 nt, synthetic construct
  source 1..20: mol_type = other RNA
tccaagtactgcgagagctt

SEQ ID NO: 8051 - RNA, 20 nt, synthetic construct
  source 1..20: mol_type = other RNA
tccagagcctgaaacgcctg

SEQ ID NO: 8052 - RNA, 20 nt, synthetic construct
  source 1..20: mol_type = other RNA
tccagctgggcacggagggc

SEQ ID NO: 8053 - RNA, 20 nt, synthetic construct
  source 1..20: mol_type = other RNA
tcccacgcgactctacccgg

SEQ ID NO: 8054 - RNA, 20 nt, synthetic construct
  source 1..20: mol_type = other RNA
tccgggtagagtcgcgtggg

SEQ ID NO: 8055 - RNA, 20 nt, synthetic construct
  source 1..20: mol_type = other RNA
tccgtgcccagctggaagga

SEQ ID NO: 8056 - RNA, 20 nt, synthetic construct
  source 1..20: mol_type = other RNA
tcctactctaccaatggcac

SEQ ID NO: 8057 - RNA, 20 nt, synthetic construct
  source 1..20: mol_type = other RNA
tcctcgcccagcaggcgcag

SEQ ID NO: 8058 - RNA, 20 nt, synthetic construct
  source 1..20: mol_type = other RNA
tcctgccctccgtgcccagc

SEQ ID NO: 8059 - RNA, 20 nt, synthetic construct
  source 1..20: mol_type = other RNA
tccttccagctgggcacgga

SEQ ID NO: 8060 - RNA, 20 nt, synthetic construct
  source 1..20: mol_type = other RNA
tcgcagtacttggagaaacc

SEQ ID NO: 8061 - RNA, 20 nt, synthetic construct
  source 1..20: mol_type = other RNA
tcgcccagcaggcgcagcgc

SEQ ID NO: 8062 - RNA, 20 nt, synthetic construct
  source 1..20: mol_type = other RNA
tcggcctccttccagctggg

SEQ ID NO: 8063 - RNA, 20 nt, synthetic construct
  source 1..20: mol_type = other RNA
tcggcgccatccagagcctg

SEQ ID NO: 8064 - RNA, 20 nt, synthetic construct
  source 1..20: mol_type = other RNA
tcggcgctggccaagcgcgc

SEQ ID NO: 8065 - RNA, 20 nt, synthetic construct
  source 1..20: mol_type = other RNA
tcggtttctccaagtactgc

SEQ ID NO: 8066 - RNA, 20 nt, synthetic construct
  source 1..20: mol_type = other RNA
tctaccaatggcactaagtc

SEQ ID NO: 8067 - RNA, 20 nt, synthetic construct
  source 1..20: mol_type = other RNA
tctacccggaagctctcgca

SEQ ID NO: 8068 - RNA, 20 nt, synthetic construct
  source 1..20: mol_type = other RNA
tctccaagtactgcgagagc

SEQ ID NO: 8069 - RNA, 20 nt, synthetic construct
  source 1..20: mol_type = other RNA
tctcgcagtacttggagaaa

SEQ ID NO: 8070 - RNA, 20 nt, synthetic construct
  source 1..20: mol_type = other RNA
tctgaacctcggcctccttc

SEQ ID NO: 8071 - RNA, 20 nt, synthetic construct
  source 1..20: mol_type = other RNA
tctgctgcagccacgtctga

SEQ ID NO: 8072 - RNA, 20 nt, synthetic construct
  source 1..20: mol_type = other RNA
tctggatggcgccgatgtcg

SEQ ID NO: 8073 - RNA, 20 nt, synthetic construct
  source 1..20: mol_type = other RNA
tgaaacgcctggtttcctac

SEQ ID NO: 8074 - RNA, 20 nt, synthetic construct
  source 1..20: mol_type = other RNA
tgaacctcggcctccttcca

SEQ ID NO: 8075 - RNA, 20 nt, synthetic construct
  source 1..20: mol_type = other RNA
tgcagcagatcggtttctcc

SEQ ID NO: 8076 - RNA, 20 nt, synthetic construct
  source 1..20: mol_type = other RNA
tgcagccacgtctgaacctc

SEQ ID NO: 8077 - RNA, 20 nt, synthetic construct
  source 1..20: mol_type = other RNA
tgccacggcccatcctgccc

SEQ ID NO: 8078 - RNA, 20 nt, synthetic construct
  source 1..20: mol_type = other RNA
tgccattggtagagtaggaa

SEQ ID NO: 8079 - RNA, 20 nt, synthetic construct
  source 1..20: mol_type = other RNA
tgcccagctggaaggaggcc

SEQ ID NO: 8080 - RNA, 20 nt, synthetic construct
  source 1..20: mol_type = other RNA
tgccctccgtgcccagctgg

SEQ ID NO: 8081 - RNA, 20 nt, synthetic construct
  source 1..20: mol_type = other RNA
tgcgagagcttccgggtaga

SEQ ID NO: 8082 - RNA, 20 nt, synthetic construct
  source 1..20: mol_type = other RNA
tgcgcctgctgggcgaggag

SEQ ID NO: 8083 - RNA, 20 nt, synthetic construct
  source 1..20: mol_type = other RNA
tgctgcagccacgtctgaac

SEQ ID NO: 8084 - RNA, 20 nt, synthetic construct
  source 1..20: mol_type = other RNA
tgctgggcgaggaggtgcca

SEQ ID NO: 8085 - RNA, 20 nt, synthetic construct
  source 1..20: mol_type = other RNA
tggaaggaggccgaggttca

SEQ ID NO: 8086 - RNA, 20 nt, synthetic construct
  source 1..20: mol_type = other RNA
tggagaaaccgatctgctgc

SEQ ID NO: 8087 - RNA, 20 nt, synthetic construct
  source 1..20: mol_type = other RNA
tggcacctcctcgcccagca

SEQ ID NO: 8088 - RNA, 20 nt, synthetic construct
  source 1..20: mol_type = other RNA
tggcactaagtcggcgctgg

SEQ ID NO: 8089 - RNA, 20 nt, synthetic construct
  source 1..20: mol_type = other RNA
tggccaagcgcgcgctgcgc

SEQ ID NO: 8090 - RNA, 20 nt, synthetic construct
  source 1..20: mol_type = other RNA
tggccagcgccgacttagtg

SEQ ID NO: 8091 - RNA, 20 nt, synthetic construct
  source 1..20: mol_type = other RNA
tggctgcagcagatcggttt

SEQ ID NO: 8092 - RNA, 20 nt, synthetic construct
  source 1..20: mol_type = other RNA
tgggcacggagggcaggatg

SEQ ID NO: 8093 - RNA, 20 nt, synthetic construct
  source 1..20: mol_type = other RNA
tgggccgtggcacctcctcg

SEQ ID NO: 8094 - RNA, 20 nt, synthetic construct
  source 1..20: mol_type = other RNA
tgggcgaggaggtgccacgg

SEQ ID NO: 8095 - RNA, 20 nt, synthetic construct
  source 1..20: mol_type = other RNA
tggtagagtaggaaaccagg

SEQ ID NO: 8096 - RNA, 20 nt, synthetic construct
  source 1..20: mol_type = other RNA
tggtttcctactctaccaat

SEQ ID NO: 8097 - RNA, 20 nt, synthetic construct
  source 1..20: mol_type = other RNA
tgttcagcgacatcggcgcc

SEQ ID NO: 8098 - RNA, 20 nt, synthetic construct
  source 1..20: mol_type = other RNA
ttagtgccattggtagagta

SEQ ID NO: 8099 - RNA, 20 nt, synthetic construct
  source 1..20: mol_type = other RNA
ttcagacgtggctgcagcag

SEQ ID NO: 8100 - RNA, 20 nt, synthetic construct
  source 1..20: mol_type = other RNA
ttcagcgacatcggcgccat

SEQ ID NO: 8101 - RNA, 20 nt, synthetic construct
  source 1..20: mol_type = other RNA
ttcaggctctggatggcgcc

SEQ ID NO: 8102 - RNA, 20 nt, synthetic construct
  source 1..20: mol_type = other RNA
ttccagctgggcacggaggg

SEQ ID NO: 8103 - RNA, 20 nt, synthetic construct
  source 1..20: mol_type = other RNA
ttccgggtagagtcgcgtgg

SEQ ID NO: 8104 - RNA, 20 nt, synthetic construct
  source 1..20: mol_type = other RNA
ttcctactctaccaatggca

SEQ ID NO: 8105 - RNA, 20 nt, synthetic construct
  source 1..20: mol_type = other RNA
ttctccaagtactgcgagag

SEQ ID NO: 8106 - RNA, 20 nt, synthetic construct
  source 1..20: mol_type = other RNA
ttggagaaaccgatctgctg

SEQ ID NO: 8107 - RNA, 20 nt, synthetic construct
  source 1..20: mol_type = other RNA
ttggccagcgccgacttagt

SEQ ID NO: 8108 - RNA, 20 nt, synthetic construct
  source 1..20: mol_type = other RNA
ttggtagagtaggaaaccag

SEQ ID NO: 8109 - RNA, 20 nt, synthetic construct
  source 1..20: mol_type = other RNA
tttcaggctctggatggcgc

SEQ ID NO: 8110 - RNA, 20 nt, synthetic construct
  source 1..20: mol_type = other RNA
tttcctactctaccaatggc

SEQ ID NO: 8111 - RNA, 20 nt, synthetic construct
  source 1..20: mol_type = other RNA
tttctccaagtactgcgaga

SEQ ID NO: 8112 - RNA, 21 nt, synthetic construct
  source 1..21: mol_type = other RNA
aaaccaggcgtttcaggctct

SEQ ID NO: 8113 - RNA, 21 nt, synthetic construct
  source 1..21: mol_type = other RNA
aaaccgatctgctgcagccac

SEQ ID NO: 8114 - RNA, 21 nt, synthetic construct
  source 1..21: mol_type = other RNA
aaacgcctggtttcctactct

SEQ ID NO: 8115 - RNA, 21 nt, synthetic construct
  source 1..21: mol_type = other RNA
aaccaggcgtttcaggctctg

SEQ ID NO: 8116 - RNA, 21 nt, synthetic construct
  source 1..21: mol_type = other RNA
aaccgatctgctgcagccacg

SEQ ID NO: 8117 - RNA, 21 nt, synthetic construct
  source 1..21: mol_type = other RNA
aacctcggcctccttccagct

SEQ ID NO: 8118 - RNA, 21 nt, synthetic construct
  source 1..21: mol_type = other RNA
aacgcctggtttcctactcta

SEQ ID NO: 8119 - RNA, 21 nt, synthetic construct
  source 1..21: mol_type = other RNA
aagcgcgcgctgcgcctgctg

SEQ ID NO: 8120 - RNA, 21 nt, synthetic construct
  source 1..21: mol_type = other RNA
aagctctcgcagtacttggag

SEQ ID NO: 8121 - RNA, 21 nt, synthetic construct
  source 1..21: mol_type = other RNA
aaggaggccgaggttcagacg

SEQ ID NO: 8122 - RNA, 21 nt, synthetic construct
  source 1..21: mol_type = other RNA
aagtactgcgagagcttccgg

SEQ ID NO: 8123 - RNA, 21 nt, synthetic construct
  source 1..21: mol_type = other RNA
aagtcggcgctggccaagcgc

SEQ ID NO: 8124 - RNA, 21 nt, synthetic construct
  source 1..21: mol_type = other RNA
aatggcactaagtcggcgctg

SEQ ID NO: 8125 - RNA, 21 nt, synthetic construct
  source 1..21: mol_type = other RNA
acatcggcgccatccagagcc

SEQ ID NO: 8126 - RNA, 21 nt, synthetic construct
  source 1..21: mol_type = other RNA
accaatggcactaagtcggcg

SEQ ID NO: 8127 - RNA, 21 nt, synthetic construct
  source 1..21: mol_type = other RNA
accaggcgtttcaggctctgg

SEQ ID NO: 8128 - RNA, 21 nt, synthetic construct
  source 1..21: mol_type = other RNA
acccggaagctctcgcagtac

SEQ ID NO: 8129 - RNA, 21 nt, synthetic construct
  source 1..21: mol_type = other RNA
accgatctgctgcagccacgt

SEQ ID NO: 8130 - RNA, 21 nt, synthetic construct
  source 1..21: mol_type = other RNA
acctcctcgcccagcaggcgc

SEQ ID NO: 8131 - RNA, 21 nt, synthetic construct
  source 1..21: mol_type = other RNA
acctcggcctccttccagctg

SEQ ID NO: 8132 - RNA, 21 nt, synthetic construct
  source 1..21: mol_type = other RNA
acgcctggtttcctactctac

SEQ ID NO: 8133 - RNA, 21 nt, synthetic construct
  source 1..21: mol_type = other RNA
acgcgactctacccggaagct

SEQ ID NO: 8134 - RNA, 21 nt, synthetic construct
  source 1..21: mol_type = other RNA
acggagggcaggatgggccgt

SEQ ID NO: 8135 - RNA, 21 nt, synthetic construct
  source 1..21: mol_type = other RNA
acggcccatcctgccctccgt

SEQ ID NO: 8136 - RNA, 21 nt, synthetic construct
  source 1..21: mol_type = other RNA
acgtctgaacctcggcctcct

SEQ ID NO: 8137 - RNA, 21 nt, synthetic construct
  source 1..21: mol_type = other RNA
acgtggctgcagcagatcggt

SEQ ID NO: 8138 - RNA, 21 nt, synthetic construct
  source 1..21: mol_type = other RNA
actaagtcggcgctggccaag

SEQ ID NO: 8139 - RNA, 21 nt, synthetic construct
  source 1..21: mol_type = other RNA
actctaccaatggcactaagt

SEQ ID NO: 8140 - RNA, 21 nt, synthetic construct
  source 1..21: mol_type = other RNA
actctacccggaagctctcgc

SEQ ID NO: 8141 - RNA, 21 nt, synthetic construct
  source 1..21: mol_type = other RNA
actgcgagagcttccgggtag

SEQ ID NO: 8142 - RNA, 21 nt, synthetic construct
  source 1..21: mol_type = other RNA
acttagtgccattggtagagt

SEQ ID NO: 8143 - RNA, 21 nt, synthetic construct
  source 1..21: mol_type = other RNA
acttggagaaaccgatctgct

SEQ ID NO: 8144 - RNA, 21 nt, synthetic construct
  source 1..21: mol_type = other RNA
agaaaccgatctgctgcagcc

SEQ ID NO: 8145 - RNA, 21 nt, synthetic construct
  source 1..21: mol_type = other RNA
agacgtggctgcagcagatcg

SEQ ID NO: 8146 - RNA, 21 nt, synthetic construct
  source 1..21: mol_type = other RNA
agagcctgaaacgcctggttt

SEQ ID NO: 8147 - RNA, 21 nt, synthetic construct
  source 1..21: mol_type = other RNA
agagcttccgggtagagtcgc

SEQ ID NO: 8148 - RNA, 21 nt, synthetic construct
  source 1..21: mol_type = other RNA
agagtaggaaaccaggcgttt

SEQ ID NO: 8149 - RNA, 21 nt, synthetic construct
  source 1..21: mol_type = other RNA
agatcggtttctccaagtact

SEQ ID NO: 8150 - RNA, 21 nt, synthetic construct
  source 1..21: mol_type = other RNA
agcagatcggtttctccaagt

SEQ ID NO: 8151 - RNA, 21 nt, synthetic construct
  source 1..21: mol_type = other RNA
agcaggcgcagcgcgcgcttg

SEQ ID NO: 8152 - RNA, 21 nt, synthetic construct
  source 1..21: mol_type = other RNA
agccacgtctgaacctcggcc

SEQ ID NO: 8153 - RNA, 21 nt, synthetic construct
  source 1..21: mol_type = other RNA
agcctgaaacgcctggtttcc

SEQ ID NO: 8154 - RNA, 21 nt, synthetic construct
  source 1..21: mol_type = other RNA
agcgacatcggcgccatccag

SEQ ID NO: 8155 - RNA, 21 nt, synthetic construct
  source 1..21: mol_type = other RNA
agcgccgacttagtgccattg

SEQ ID NO: 8156 - RNA, 21 nt, synthetic construct
  source 1..21: mol_type = other RNA
agcgcgcgctgcgcctgctgg

SEQ ID NO: 8157 - RNA, 21 nt, synthetic construct
  source 1..21: mol_type = other RNA
agcgcgcgcttggccagcgcc

SEQ ID NO: 8158 - RNA, 21 nt, synthetic construct
  source 1..21: mol_type = other RNA
agctctcgcagtacttggaga

SEQ ID NO: 8159 - RNA, 21 nt, synthetic construct
  source 1..21: mol_type = other RNA
agctggaaggaggccgaggtt

SEQ ID NO: 8160 - RNA, 21 nt, synthetic construct
  source 1..21: mol_type = other RNA
agctgggcacggagggcagga

SEQ ID NO: 8161 - RNA, 21 nt, synthetic construct
  source 1..21: mol_type = other RNA
agcttccgggtagagtcgcgt

SEQ ID NO: 8162 - RNA, 21 nt, synthetic construct
  source 1..21: mol_type = other RNA
aggaaaccaggcgtttcaggc

SEQ ID NO: 8163 - RNA, 21 nt, synthetic construct
  source 1..21: mol_type = other RNA
aggaggccgaggttcagacgt

SEQ ID NO: 8164 - RNA, 21 nt, synthetic construct
  source 1..21: mol_type = other RNA
aggaggtgccacggcccatcc

SEQ ID NO: 8165 - RNA, 21 nt, synthetic construct
  source 1..21: mol_type = other RNA
aggatgggccgtggcacctcc

SEQ ID NO: 8166 - RNA, 21 nt, synthetic construct
  source 1..21: mol_type = other RNA
aggccgaggttcagacgtggc

SEQ ID NO: 8167 - RNA, 21 nt, synthetic construct
  source 1..21: mol_type = other RNA
aggcgcagcgcgcgcttggcc

SEQ ID NO: 8168 - RNA, 21 nt, synthetic construct
  source 1..21: mol_type = other RNA
aggcgtatcccacgcgactct

SEQ ID NO: 8169 - RNA, 21 nt, synthetic construct
  source 1..21: mol_type = other RNA
aggcgtttcaggctctggatg

SEQ ID NO: 8170 - RNA, 21 nt, synthetic construct
  source 1..21: mol_type = other RNA
aggctctggatggcgccgatg

SEQ ID NO: 8171 - RNA, 21 nt, synthetic construct
  source 1..21: mol_type = other RNA
agggcaggatgggccgtggca

SEQ ID NO: 8172 - RNA, 21 nt, synthetic construct
  source 1..21: mol_type = other RNA
aggtgccacggcccatcctgc

SEQ ID NO: 8173 - RNA, 21 nt, synthetic construct
  source 1..21: mol_type = other RNA
aggttcagacgtggctgcagc

SEQ ID NO: 8174 - RNA, 21 nt, synthetic construct
  source 1..21: mol_type = other RNA
agtactgcgagagcttccggg

SEQ ID NO: 8175 - RNA, 21 nt, synthetic construct
  source 1..21: mol_type = other RNA
agtacttggagaaaccgatct

SEQ ID NO: 8176 - RNA, 21 nt, synthetic construct
  source 1..21: mol_type = other RNA
agtaggaaaccaggcgtttca

SEQ ID NO: 8177 - RNA, 21 nt, synthetic construct
  source 1..21: mol_type = other RNA
agtcggcgctggccaagcgcg

SEQ ID NO: 8178 - RNA, 21 nt, synthetic construct
  source 1..21: mol_type = other RNA
agtgccattggtagagtagga

SEQ ID NO: 8179 - RNA, 21 nt, synthetic construct
  source 1..21: mol_type = other RNA
atccagagcctgaaacgcctg

SEQ ID NO: 8180 - RNA, 21 nt, synthetic construct
  source 1..21: mol_type = other RNA
atcccacgcgactctacccgg

SEQ ID NO: 8181 - RNA, 21 nt, synthetic construct
  source 1..21: mol_type = other RNA
atcctgccctccgtgcccagc

SEQ ID NO: 8182 - RNA, 21 nt, synthetic construct
  source 1..21: mol_type = other RNA
atcggcgccatccagagcctg

SEQ ID NO: 8183 - RNA, 21 nt, synthetic construct
  source 1..21: mol_type = other RNA
atcggtttctccaagtactgc

SEQ ID NO: 8184 - RNA, 21 nt, synthetic construct
  source 1..21: mol_type = other RNA
atctgctgcagccacgtctga

SEQ ID NO: 8185 - RNA, 21 nt, synthetic construct
  source 1..21: mol_type = other RNA
atggcactaagtcggcgctgg

SEQ ID NO: 8186 - RNA, 21 nt, synthetic construct
  source 1..21: mol_type = other RNA
atgggccgtggcacctcctcg

SEQ ID NO: 8187 - RNA, 21 nt, synthetic construct
  source 1..21: mol_type = other RNA
attggtagagtaggaaaccag

SEQ ID NO: 8188 - RNA, 21 nt, synthetic construct
  source 1..21: mol_type = other RNA
caagcgcgcgctgcgcctgct

SEQ ID NO: 8189 - RNA, 21 nt, synthetic construct
  source 1..21: mol_type = other RNA
caagtactgcgagagcttccg

SEQ ID NO: 8190 - RNA, 21 nt, synthetic construct
  source 1..21: mol_type = other RNA
caatggcactaagtcggcgct

SEQ ID NO: 8191 - RNA, 21 nt, synthetic construct
  source 1..21: mol_type = other RNA
cacctcctcgcccagcaggcg

SEQ ID NO: 8192 - RNA, 21 nt, synthetic construct
  source 1..21: mol_type = other RNA
cacgcgactctacccggaagc

SEQ ID NO: 8193 - RNA, 21 nt, synthetic construct
  source 1..21: mol_type = other RNA
cacggagggcaggatgggccg

SEQ ID NO: 8194 - RNA, 21 nt, synthetic construct
  source 1..21: mol_type = other RNA
cacggcccatcctgccctccg

SEQ ID NO: 8195 - RNA, 21 nt, synthetic construct
  source 1..21: mol_type = other RNA
cacgtctgaacctcggcctcc

SEQ ID NO: 8196 - RNA, 21 nt, synthetic construct
  source 1..21: mol_type = other RNA
cactaagtcggcgctggccaa

SEQ ID NO: 8197 - RNA, 21 nt, synthetic construct
  source 1..21: mol_type = other RNA
cagacgtggctgcagcagatc

SEQ ID NO: 8198 - RNA, 21 nt, synthetic construct
  source 1..21: mol_type = other RNA
cagagcctgaaacgcctggtt

SEQ ID NO: 8199 - RNA, 21 nt, synthetic construct
  source 1..21: mol_type = other RNA
cagatcggtttctccaagtac

SEQ ID NO: 8200 - RNA, 21 nt, synthetic construct
  source 1..21: mol_type = other RNA
cagcagatcggtttctccaag

SEQ ID NO: 8201 - RNA, 21 nt, synthetic construct
  source 1..21: mol_type = other RNA
cagcaggcgcagcgcgcgctt

SEQ ID NO: 8202 - RNA, 21 nt, synthetic construct
  source 1..21: mol_type = other RNA
cagccacgtctgaacctcggc

SEQ ID NO: 8203 - RNA, 21 nt, synthetic construct
  source 1..21: mol_type = other RNA
cagcgacatcggcgccatcca

SEQ ID NO: 8204 - RNA, 21 nt, synthetic construct
  source 1..21: mol_type = other RNA
cagcgccgacttagtgccatt

SEQ ID NO: 8205 - RNA, 21 nt, synthetic construct
  source 1..21: mol_type = other RNA
cagcgcgcgcttggccagcgc

SEQ ID NO: 8206 - RNA, 21 nt, synthetic construct
  source 1..21: mol_type = other RNA
cagctggaaggaggccgaggt

SEQ ID NO: 8207 - RNA, 21 nt, synthetic construct
  source 1..21: mol_type = other RNA
cagctgggcacggagggcagg

SEQ ID NO: 8208 - RNA, 21 nt, synthetic construct
  source 1..21: mol_type = other RNA
caggatgggccgtggcacctc

SEQ ID NO: 8209 - RNA, 21 nt, synthetic construct
  source 1..21: mol_type = other RNA
caggcgcagcgcgcgcttggc

SEQ ID NO: 8210 - RNA, 21 nt, synthetic construct
  source 1..21: mol_type = other RNA
caggcgtttcaggctctggat

SEQ ID NO: 8211 - RNA, 21 nt, synthetic construct
  source 1..21: mol_type = other RNA
caggctctggatggcgccgat

SEQ ID NO: 8212 - RNA, 21 nt, synthetic construct
  source 1..21: mol_type = other RNA
cagtacttggagaaaccgatc

SEQ ID NO: 8213 - RNA, 21 nt, synthetic construct
  source 1..21: mol_type = other RNA
catccagagcctgaaacgcct

SEQ ID NO: 8214 - RNA, 21 nt, synthetic construct
  source 1..21: mol_type = other RNA
catcctgccctccgtgcccag

SEQ ID NO: 8215 - RNA, 21 nt, synthetic construct
  source 1..21: mol_type = other RNA
catcggcgccatccagagcct

SEQ ID NO: 8216 - RNA, 21 nt, synthetic construct
  source 1..21: mol_type = other RNA
cattggtagagtaggaaacca

SEQ ID NO: 8217 - RNA, 21 nt, synthetic construct
  source 1..21: mol_type = other RNA
ccaagcgcgcgctgcgcctgc

SEQ ID NO: 8218 - RNA, 21 nt, synthetic construct
  source 1..21: mol_type = other RNA
ccaagtactgcgagagcttcc

SEQ ID NO: 8219 - RNA, 21 nt, synthetic construct
  source 1..21: mol_type = other RNA
ccaatggcactaagtcggcgc

SEQ ID NO: 8220 - RNA, 21 nt, synthetic construct
  source 1..21: mol_type = other RNA
ccacgcgactctacccggaag

SEQ ID NO: 8221 - RNA, 21 nt, synthetic construct
  source 1..21: mol_type = other RNA
ccacggcccatcctgccctcc

SEQ ID NO: 8222 - RNA, 21 nt, synthetic construct
  source 1..21: mol_type = other RNA
ccacgtctgaacctcggcctc

SEQ ID NO: 8223 - RNA, 21 nt, synthetic construct
  source 1..21: mol_type = other RNA
ccagagcctgaaacgcctggt

SEQ ID NO: 8224 - RNA, 21 nt, synthetic construct
  source 1..21: mol_type = other RNA
ccagcaggcgcagcgcgcgct

SEQ ID NO: 8225 - RNA, 21 nt, synthetic construct
  source 1..21: mol_type = other RNA
ccagcgccgacttagtgccat

SEQ ID NO: 8226 - RNA, 21 nt, synthetic construct
  source 1..21: mol_type = other RNA
ccagctggaaggaggccgagg

SEQ ID NO: 8227 - RNA, 21 nt, synthetic construct
  source 1..21: mol_type = other RNA
ccagctgggcacggagggcag

SEQ ID NO: 8228 - RNA, 21 nt, synthetic construct
  source 1..21: mol_type = other RNA
ccaggcgtttcaggctctgga

SEQ ID NO: 8229 - RNA, 21 nt, synthetic construct
  source 1..21: mol_type = other RNA
ccatccagagcctgaaacgcc

SEQ ID NO: 8230 - RNA, 21 nt, synthetic construct
  source 1..21: mol_type = other RNA
ccatcctgccctccgtgccca

SEQ ID NO: 8231 - RNA, 21 nt, synthetic construct
  source 1..21: mol_type = other RNA
ccattggtagagtaggaaacc

SEQ ID NO: 8232 - RNA, 21 nt, synthetic construct
  source 1..21: mol_type = other RNA
cccacgcgactctacccggaa

SEQ ID NO: 8233 - RNA, 21 nt, synthetic construct
  source 1..21: mol_type = other RNA
cccagcaggcgcagcgcgcgc

SEQ ID NO: 8234 - RNA, 21 nt, synthetic construct
  source 1..21: mol_type = other RNA
cccagctggaaggaggccgag

SEQ ID NO: 8235 - RNA, 21 nt, synthetic construct
  source 1..21: mol_type = other RNA
cccatcctgccctccgtgccc

SEQ ID NO: 8236 - RNA, 21 nt, synthetic construct
  source 1..21: mol_type = other RNA
cccggaagctctcgcagtact

SEQ ID NO: 8237 - RNA, 21 nt, synthetic construct
  source 1..21: mol_type = other RNA
ccctccgtgcccagctggaag

SEQ ID NO: 8238 - RNA, 21 nt, synthetic construct
  source 1..21: mol_type = other RNA
ccgacttagtgccattggtag

SEQ ID NO: 8239 - RNA, 21 nt, synthetic construct
  source 1..21: mol_type = other RNA
ccgaggttcagacgtggctgc

SEQ ID NO: 8240 - RNA, 21 nt, synthetic construct
  source 1..21: mol_type = other RNA
ccgatctgctgcagccacgtc

SEQ ID NO: 8241 - RNA, 21 nt, synthetic construct
  source 1..21: mol_type = other RNA
ccggaagctctcgcagtactt

SEQ ID NO: 8242 - RNA, 21 nt, synthetic construct
  source 1..21: mol_type = other RNA
ccgggtagagtcgcgtgggat

SEQ ID NO: 8243 - RNA, 21 nt, synthetic construct
  source 1..21: mol_type = other RNA
ccgtgcccagctggaaggagg

SEQ ID NO: 8244 - RNA, 21 nt, synthetic construct
  source 1..21: mol_type = other RNA
ccgtggcacctcctcgcccag

SEQ ID NO: 8245 - RNA, 21 nt, synthetic construct
  source 1..21: mol_type = other RNA
cctactctaccaatggcacta

SEQ ID NO: 8246 - RNA, 21 nt, synthetic construct
  source 1..21: mol_type = other RNA
cctccgtgcccagctggaagg

SEQ ID NO: 8247 - RNA, 21 nt, synthetic construct
  source 1..21: mol_type = other RNA
cctcctcgcccagcaggcgca

SEQ ID NO: 8248 - RNA, 21 nt, synthetic construct
  source 1..21: mol_type = other RNA
cctccttccagctgggcacgg

SEQ ID NO: 8249 - RNA, 21 nt, synthetic construct
  source 1..21: mol_type = other RNA
cctcgcccagcaggcgcagcg

SEQ ID NO: 8250 - RNA, 21 nt, synthetic construct
  source 1..21: mol_type = other RNA
cctcggcctccttccagctgg

SEQ ID NO: 8251 - RNA, 21 nt, synthetic construct
  source 1..21: mol_type = other RNA
cctgaaacgcctggtttccta

SEQ ID NO: 8252 - RNA, 21 nt, synthetic construct
  source 1..21: mol_type = other RNA
cctgccctccgtgcccagctg

SEQ ID NO: 8253 - RNA, 21 nt, synthetic construct
  source 1..21: mol_type = other RNA
cctgctgggcgaggaggtgcc

SEQ ID NO: 8254 - RNA, 21 nt, synthetic construct
  source 1..21: mol_type = other RNA
cctggtttcctactctaccaa

SEQ ID NO: 8255 - RNA, 21 nt, synthetic construct
  source 1..21: mol_type = other RNA
ccttccagctgggcacggagg

SEQ ID NO: 8256 - RNA, 21 nt, synthetic construct
  source 1..21: mol_type = other RNA
cgacatcggcgccatccagag

SEQ ID NO: 8257 - RNA, 21 nt, synthetic construct
  source 1..21: mol_type = other RNA
cgactctacccggaagctctc

SEQ ID NO: 8258 - RNA, 21 nt, synthetic construct
  source 1..21: mol_type = other RNA
cgacttagtgccattggtaga

SEQ ID NO: 8259 - RNA, 21 nt, synthetic construct
  source 1..21: mol_type = other RNA
cgagagcttccgggtagagtc

SEQ ID NO: 8260 - RNA, 21 nt, synthetic construct
  source 1..21: mol_type = other RNA
cgaggaggtgccacggcccat

SEQ ID NO: 8261 - RNA, 21 nt, synthetic construct
  source 1..21: mol_type = other RNA
cgaggttcagacgtggctgca

SEQ ID NO: 8262 - RNA, 21 nt, synthetic construct
  source 1..21: mol_type = other RNA
cgatctgctgcagccacgtct

SEQ ID NO: 8263 - RNA, 21 nt, synthetic construct
  source 1..21: mol_type = other RNA
cgcagcgcgcgcttggccagc

SEQ ID NO: 8264 - RNA, 21 nt, synthetic construct
  source 1..21: mol_type = other RNA
cgcagtacttggagaaaccga

SEQ ID NO: 8265 - RNA, 21 nt, synthetic construct
  source 1..21: mol_type = other RNA
cgccatccagagcctgaaacg

SEQ ID NO: 8266 - RNA, 21 nt, synthetic construct
  source 1..21: mol_type = other RNA
cgcccagcaggcgcagcgcgc

SEQ ID NO: 8267 - RNA, 21 nt, synthetic construct
  source 1..21: mol_type = other RNA
cgccgacttagtgccattggt

SEQ ID NO: 8268 - RNA, 21 nt, synthetic construct
  source 1..21: mol_type = other RNA
cgcctgctgggcgaggaggtg

SEQ ID NO: 8269 - RNA, 21 nt, synthetic construct
  source 1..21: mol_type = other RNA
cgcctggtttcctactctacc

SEQ ID NO: 8270 - RNA, 21 nt, synthetic construct
  source 1..21: mol_type = other RNA
cgcgactctacccggaagctc

SEQ ID NO: 8271 - RNA, 21 nt, synthetic construct
  source 1..21: mol_type = other RNA
cgcgcgctgcgcctgctgggc

SEQ ID NO: 8272 - RNA, 21 nt, synthetic construct
  source 1..21: mol_type = other RNA
cgcgcgcttggccagcgccga

SEQ ID NO: 8273 - RNA, 21 nt, synthetic construct
  source 1..21: mol_type = other RNA
cgcgctgcgcctgctgggcga

SEQ ID NO: 8274 - RNA, 21 nt, synthetic construct
  source 1..21: mol_type = other RNA
cgcgcttggccagcgccgact

SEQ ID NO: 8275 - RNA, 21 nt, synthetic construct
  source 1..21: mol_type = other RNA
cgctgcgcctgctgggcgagg

SEQ ID NO: 8276 - RNA, 21 nt, synthetic construct
  source 1..21: mol_type = other RNA
cgctggccaagcgcgcgctgc

SEQ ID NO: 8277 - RNA, 21 nt, synthetic construct
  source 1..21: mol_type = other RNA
cgcttggccagcgccgactta

SEQ ID NO: 8278 - RNA, 21 nt, synthetic construct
  source 1..21: mol_type = other RNA
cggaagctctcgcagtacttg

SEQ ID NO: 8279 - RNA, 21 nt, synthetic construct
  source 1..21: mol_type = other RNA
cggagggcaggatgggccgtg

SEQ ID NO: 8280 - RNA, 21 nt, synthetic construct
  source 1..21: mol_type = other RNA
cggcccatcctgccctccgtg

SEQ ID NO: 8281 - RNA, 21 nt, synthetic construct
  source 1..21: mol_type = other RNA
cggcctccttccagctgggca

SEQ ID NO: 8282 - RNA, 21 nt, synthetic construct
  source 1..21: mol_type = other RNA
cggcgccatccagagcctgaa

SEQ ID NO: 8283 - RNA, 21 nt, synthetic construct
  source 1..21: mol_type = other RNA
cggcgctggccaagcgcgcgc

SEQ ID NO: 8284 - RNA, 21 nt, synthetic construct
  source 1..21: mol_type = other RNA
cgggggaggcgtatcccacgc

SEQ ID NO: 8285 - RNA, 21 nt, synthetic construct
  source 1..21: mol_type = other RNA
cgggtagagtcgcgtgggata

SEQ ID NO: 8286 - RNA, 21 nt, synthetic construct
  source 1..21: mol_type = other RNA
cggtttctccaagtactgcga

SEQ ID NO: 8287 - RNA, 21 nt, synthetic construct
  source 1..21: mol_type = other RNA
cgtatcccacgcgactctacc

SEQ ID NO: 8288 - RNA, 21 nt, synthetic construct
  source 1..21: mol_type = other RNA
cgtctgaacctcggcctcctt

SEQ ID NO: 8289 - RNA, 21 nt, synthetic construct
  source 1..21: mol_type = other RNA
cgtgcccagctggaaggaggc

SEQ ID NO: 8290 - RNA, 21 nt, synthetic construct
  source 1..21: mol_type = other RNA
cgtggcacctcctcgcccagc

SEQ ID NO: 8291 - RNA, 21 nt, synthetic construct
  source 1..21: mol_type = other RNA
cgtggctgcagcagatcggtt

SEQ ID NO: 8292 - RNA, 21 nt, synthetic construct
  source 1..21: mol_type = other RNA
cgtttcaggctctggatggcg

SEQ ID NO: 8293 - RNA, 21 nt, synthetic construct
  source 1..21: mol_type = other RNA
ctaagtcggcgctggccaagc

SEQ ID NO: 8294 - RNA, 21 nt, synthetic construct
  source 1..21: mol_type = other RNA
ctaccaatggcactaagtcgg

SEQ ID NO: 8295 - RNA, 21 nt, synthetic construct
  source 1..21: mol_type = other RNA
ctacccggaagctctcgcagt

SEQ ID NO: 8296 - RNA, 21 nt, synthetic construct
  source 1..21: mol_type = other RNA
ctactctaccaatggcactaa

SEQ ID NO: 8297 - RNA, 21 nt, synthetic construct
  source 1..21: mol_type = other RNA
ctccaagtactgcgagagctt

SEQ ID NO: 8298 - RNA, 21 nt, synthetic construct
  source 1..21: mol_type = other RNA
ctccgtgcccagctggaagga

SEQ ID NO: 8299 - RNA, 21 nt, synthetic construct
  source 1..21: mol_type = other RNA
ctcctcgcccagcaggcgcag

SEQ ID NO: 8300 - RNA, 21 nt, synthetic construct
  source 1..21: mol_type = other RNA
ctccttccagctgggcacgga

SEQ ID NO: 8301 - RNA, 21 nt, synthetic construct
  source 1..21: mol_type = other RNA
ctcgcagtacttggagaaacc

SEQ ID NO: 8302 - RNA, 21 nt, synthetic construct
  source 1..21: mol_type = other RNA
ctcgcccagcaggcgcagcgc

SEQ ID NO: 8303 - RNA, 21 nt, synthetic construct
  source 1..21: mol_type = other RNA
ctcggcctccttccagctggg

SEQ ID NO: 8304 - RNA, 21 nt, synthetic construct
  source 1..21: mol_type = other RNA
ctctaccaatggcactaagtc

SEQ ID NO: 8305 - RNA, 21 nt, synthetic construct
  source 1..21: mol_type = other RNA
ctctacccggaagctctcgca

SEQ ID NO: 8306 - RNA, 21 nt, synthetic construct
  source 1..21: mol_type = other RNA
ctctcgcagtacttggagaaa

SEQ ID NO: 8307 - RNA, 21 nt, synthetic construct
  source 1..21: mol_type = other RNA
ctctggatggcgccgatgtcg

SEQ ID NO: 8308 - RNA, 21 nt, synthetic construct
  source 1..21: mol_type = other RNA
ctgaaacgcctggtttcctac

SEQ ID NO: 8309 - RNA, 21 nt, synthetic construct
  source 1..21: mol_type = other RNA
ctgaacctcggcctccttcca

SEQ ID NO: 8310 - RNA, 21 nt, synthetic construct
  source 1..21: mol_type = other RNA
ctgcagcagatcggtttctcc

SEQ ID NO: 8311 - RNA, 21 nt, synthetic construct
  source 1..21: mol_type = other RNA
ctgcagccacgtctgaacctc

SEQ ID NO: 8312 - RNA, 21 nt, synthetic construct
  source 1..21: mol_type = other RNA
ctgccctccgtgcccagctgg

SEQ ID NO: 8313 - RNA, 21 nt, synthetic construct
  source 1..21: mol_type = other RNA
ctgcgagagcttccgggtaga

SEQ ID NO: 8314 - RNA, 21 nt, synthetic construct
  source 1..21: mol_type = other RNA
ctgcgcctgctgggcgaggag

SEQ ID NO: 8315 - RNA, 21 nt, synthetic construct
  source 1..21: mol_type = other RNA
ctgctgcagccacgtctgaac

SEQ ID NO: 8316 - RNA, 21 nt, synthetic construct
  source 1..21: mol_type = other RNA
ctgctgggcgaggaggtgcca

SEQ ID NO: 8317 - RNA, 21 nt, synthetic construct
  source 1..21: mol_type = other RNA
ctggaaggaggccgaggttca

SEQ ID NO: 8318 - RNA, 21 nt, synthetic construct
  source 1..21: mol_type = other RNA
ctggccaagcgcgcgctgcgc

SEQ ID NO: 8319 - RNA, 21 nt, synthetic construct
  source 1..21: mol_type = other RNA
ctgggcacggagggcaggatg

SEQ ID NO: 8320 - RNA, 21 nt, synthetic construct
  source 1..21: mol_type = other RNA
ctgggcgaggaggtgccacgg

SEQ ID NO: 8321 - RNA, 21 nt, synthetic construct
  source 1..21: mol_type = other RNA
ctggtttcctactctaccaat

SEQ ID NO: 8322 - RNA, 21 nt, synthetic construct
  source 1..21: mol_type = other RNA
cttagtgccattggtagagta

SEQ ID NO: 8323 - RNA, 21 nt, synthetic construct
  source 1..21: mol_type = other RNA
cttccagctgggcacggaggg

SEQ ID NO: 8324 - RNA, 21 nt, synthetic construct
  source 1..21: mol_type = other RNA
cttccgggtagagtcgcgtgg

SEQ ID NO: 8325 - RNA, 21 nt, synthetic construct
  source 1..21: mol_type = other RNA
cttggagaaaccgatctgctg

SEQ ID NO: 8326 - RNA, 21 nt, synthetic construct
  source 1..21: mol_type = other RNA
cttggccagcgccgacttagt

SEQ ID NO: 8327 - RNA, 21 nt, synthetic construct
  source 1..21: mol_type = other RNA
gaaaccaggcgtttcaggctc

SEQ ID NO: 8328 - RNA, 21 nt, synthetic construct
  source 1..21: mol_type = other RNA
gaaaccgatctgctgcagcca

SEQ ID NO: 8329 - RNA, 21 nt, synthetic construct
  source 1..21: mol_type = other RNA
gaaacgcctggtttcctactc

SEQ ID NO: 8330 - RNA, 21 nt, synthetic construct
  source 1..21: mol_type = other RNA
gaacctcggcctccttccagc

SEQ ID NO: 8331 - RNA, 21 nt, synthetic construct
  source 1..21: mol_type = other RNA
gaagctctcgcagtacttgga

SEQ ID NO: 8332 - RNA, 21 nt, synthetic construct
  source 1..21: mol_type = other RNA
gaaggaggccgaggttcagac

SEQ ID NO: 8333 - RNA, 21 nt, synthetic construct
  source 1..21: mol_type = other RNA
gacatcggcgccatccagagc

SEQ ID NO: 8334 - RNA, 21 nt, synthetic construct
  source 1..21: mol_type = other RNA
gacgtggctgcagcagatcgg

SEQ ID NO: 8335 - RNA, 21 nt, synthetic construct
  source 1..21: mol_type = other RNA
gactctacccggaagctctcg

SEQ ID NO: 8336 - RNA, 21 nt, synthetic construct
  source 1..21: mol_type = other RNA
gacttagtgccattggtagag

SEQ ID NO: 8337 - RNA, 21 nt, synthetic construct
  source 1..21: mol_type = other RNA
gagaaaccgatctgctgcagc

SEQ ID NO: 8338 - RNA, 21 nt, synthetic construct
  source 1..21: mol_type = other RNA
gagagcttccgggtagagtcg

SEQ ID NO: 8339 - RNA, 21 nt, synthetic construct
  source 1..21: mol_type = other RNA
gagcctgaaacgcctggtttc

SEQ ID NO: 8340 - RNA, 21 nt, synthetic construct
  source 1..21: mol_type = other RNA
gagcttccgggtagagtcgcg

SEQ ID NO: 8341 - RNA, 21 nt, synthetic construct
  source 1..21: mol_type = other RNA
gaggaggtgccacggcccatc

SEQ ID NO: 8342 - RNA, 21 nt, synthetic construct
  source 1..21: mol_type = other RNA
gaggccgaggttcagacgtgg

SEQ ID NO: 8343 - RNA, 21 nt, synthetic construct
  source 1..21: mol_type = other RNA
gaggcgtatcccacgcgactc

SEQ ID NO: 8344 - RNA, 21 nt, synthetic construct
  source 1..21: mol_type = other RNA
gagggcaggatgggccgtggc

SEQ ID NO: 8345 - RNA, 21 nt, synthetic construct
  source 1..21: mol_type = other RNA
gaggtgccacggcccatcctg

SEQ ID NO: 8346 - RNA, 21 nt, synthetic construct
  source 1..21: mol_type = other RNA
gaggttcagacgtggctgcag

SEQ ID NO: 8347 - RNA, 21 nt, synthetic construct
  source 1..21: mol_type = other RNA
gagtaggaaaccaggcgtttc

SEQ ID NO: 8348 - RNA, 21 nt, synthetic construct
  source 1..21: mol_type = other RNA
gatcggtttctccaagtactg

SEQ ID NO: 8349 - RNA, 21 nt, synthetic construct
  source 1..21: mol_type = other RNA
gatctgctgcagccacgtctg

SEQ ID NO: 8350 - RNA, 21 nt, synthetic construct
  source 1..21: mol_type = other RNA
gatgggccgtggcacctcctc

SEQ ID NO: 8351 - RNA, 21 nt, synthetic construct
  source 1..21: mol_type = other RNA
gcacctcctcgcccagcaggc

SEQ ID NO: 8352 - RNA, 21 nt, synthetic construct
  source 1..21: mol_type = other RNA
gcacggagggcaggatgggcc

SEQ ID NO: 8353 - RNA, 21 nt, synthetic construct
  source 1..21: mol_type = other RNA
gcactaagtcggcgctggcca

SEQ ID NO: 8354 - RNA, 21 nt, synthetic construct
  source 1..21: mol_type = other RNA
gcagatcggtttctccaagta

SEQ ID NO: 8355 - RNA, 21 nt, synthetic construct
  source 1..21: mol_type = other RNA
gcagcagatcggtttctccaa

SEQ ID NO: 8356 - RNA, 21 nt, synthetic construct
  source 1..21: mol_type = other RNA
gcagccacgtctgaacctcgg

SEQ ID NO: 8357 - RNA, 21 nt, synthetic construct
  source 1..21: mol_type = other RNA
gcagcgcgcgcttggccagcg

SEQ ID NO: 8358 - RNA, 21 nt, synthetic construct
  source 1..21: mol_type = other RNA
gcaggatgggccgtggcacct

SEQ ID NO: 8359 - RNA, 21 nt, synthetic construct
  source 1..21: mol_type = other RNA
gcaggcgcagcgcgcgcttgg

SEQ ID NO: 8360 - RNA, 21 nt, synthetic construct
  source 1..21: mol_type = other RNA
gcagtacttggagaaaccgat

SEQ ID NO: 8361 - RNA, 21 nt, synthetic construct
  source 1..21: mol_type = other RNA
gccaagcgcgcgctgcgcctg

SEQ ID NO: 8362 - RNA, 21 nt, synthetic construct
  source 1..21: mol_type = other RNA
gccacggcccatcctgccctc

SEQ ID NO: 8363 - RNA, 21 nt, synthetic construct
  source 1..21: mol_type = other RNA
gccacgtctgaacctcggcct

SEQ ID NO: 8364 - RNA, 21 nt, synthetic construct
  source 1..21: mol_type = other RNA
gccagcgccgacttagtgcca

SEQ ID NO: 8365 - RNA, 21 nt, synthetic construct
  source 1..21: mol_type = other RNA
gccatccagagcctgaaacgc

SEQ ID NO: 8366 - RNA, 21 nt, synthetic construct
  source 1..21: mol_type = other RNA
gccattggtagagtaggaaac

SEQ ID NO: 8367 - RNA, 21 nt, synthetic construct
  source 1..21: mol_type = other RNA
gcccagcaggcgcagcgcgcg

SEQ ID NO: 8368 - RNA, 21 nt, synthetic construct
  source 1..21: mol_type = other RNA
gcccagctggaaggaggccga

SEQ ID NO: 8369 - RNA, 21 nt, synthetic construct
  source 1..21: mol_type = other RNA
gcccatcctgccctccgtgcc

SEQ ID NO: 8370 - RNA, 21 nt, synthetic construct
  source 1..21: mol_type = other RNA
gccctccgtgcccagctggaa

SEQ ID NO: 8371 - RNA, 21 nt, synthetic construct
  source 1..21: mol_type = other RNA
gccgacttagtgccattggta

SEQ ID NO: 8372 - RNA, 21 nt, synthetic construct
  source 1..21: mol_type = other RNA
gccgaggttcagacgtggctg

SEQ ID NO: 8373 - RNA, 21 nt, synthetic construct
  source 1..21: mol_type = other RNA
gccgtggcacctcctcgccca

SEQ ID NO: 8374 - RNA, 21 nt, synthetic construct
  source 1..21: mol_type = other RNA
gcctccttccagctgggcacg

SEQ ID NO: 8375 - RNA, 21 nt, synthetic construct
  source 1..21: mol_type = other RNA
gcctgaaacgcctggtttcct

SEQ ID NO: 8376 - RNA, 21 nt, synthetic construct
  source 1..21: mol_type = other RNA
gcctgctgggcgaggaggtgc

SEQ ID NO: 8377 - RNA, 21 nt, synthetic construct
  source 1..21: mol_type = other RNA
gcctggtttcctactctacca

SEQ ID NO: 8378 - RNA, 21 nt, synthetic construct
  source 1..21: mol_type = other RNA
gcgacatcggcgccatccaga

SEQ ID NO: 8379 - RNA, 21 nt, synthetic construct
  source 1..21: mol_type = other RNA
gcgactctacccggaagctct

SEQ ID NO: 8380 - RNA, 21 nt, synthetic construct
  source 1..21: mol_type = other RNA
gcgagagcttccgggtagagt

SEQ ID NO: 8381 - RNA, 21 nt, synthetic construct
  source 1..21: mol_type = other RNA
gcgaggaggtgccacggccca

SEQ ID NO: 8382 - RNA, 21 nt, synthetic construct
  source 1..21: mol_type = other RNA
gcgcagcgcgcgcttggccag

SEQ ID NO: 8383 - RNA, 21 nt, synthetic construct
  source 1..21: mol_type = other RNA
gcgccatccagagcctgaaac

SEQ ID NO: 8384 - RNA, 21 nt, synthetic construct
  source 1..21: mol_type = other RNA
gcgccgacttagtgccattgg

SEQ ID NO: 8385 - RNA, 21 nt, synthetic construct
  source 1..21: mol_type = other RNA
gcgcctgctgggcgaggaggt

SEQ ID NO: 8386 - RNA, 21 nt, synthetic construct
  source 1..21: mol_type = other RNA
gcgcgcgctgcgcctgctggg

SEQ ID NO: 8387 - RNA, 21 nt, synthetic construct
  source 1..21: mol_type = other RNA
gcgcgcgcttggccagcgccg

SEQ ID NO: 8388 - RNA, 21 nt, synthetic construct
  source 1..21: mol_type = other RNA
gcgcgctgcgcctgctgggcg

SEQ ID NO: 8389 - RNA, 21 nt, synthetic construct
  source 1..21: mol_type = other RNA
gcgcgcttggccagcgccgac

SEQ ID NO: 8390 - RNA, 21 nt, synthetic construct
  source 1..21: mol_type = other RNA
gcgctgcgcctgctgggcgag

SEQ ID NO: 8391 - RNA, 21 nt, synthetic construct
  source 1..21: mol_type = other RNA
gcgctggccaagcgcgcgctg

SEQ ID NO: 8392 - RNA, 21 nt, synthetic construct
  source 1..21: mol_type = other RNA
gcgcttggccagcgccgactt

SEQ ID NO: 8393 - RNA, 21 nt, synthetic construct
  source 1..21: mol_type = other RNA
gcgtatcccacgcgactctac

SEQ ID NO: 8394 - RNA, 21 nt, synthetic construct
  source 1..21: mol_type = other RNA
gcgtttcaggctctggatggc

SEQ ID NO: 8395 - RNA, 21 nt, synthetic construct
  source 1..21: mol_type = other RNA
gctctcgcagtacttggagaa

SEQ ID NO: 8396 - RNA, 21 nt, synthetic construct
  source 1..21: mol_type = other RNA
gctctggatggcgccgatgtc

SEQ ID NO: 8397 - RNA, 21 nt, synthetic construct
  source 1..21: mol_type = other RNA
gctgcagcagatcggtttctc

SEQ ID NO: 8398 - RNA, 21 nt, synthetic construct
  source 1..21: mol_type = other RNA
gctgcagccacgtctgaacct

SEQ ID NO: 8399 - RNA, 21 nt, synthetic construct
  source 1..21: mol_type = other RNA
gctgcgcctgctgggcgagga

SEQ ID NO: 8400 - RNA, 21 nt, synthetic construct
  source 1..21: mol_type = other RNA
gctggaaggaggccgaggttc

SEQ ID NO: 8401 - RNA, 21 nt, synthetic construct
  source 1..21: mol_type = other RNA
gctggccaagcgcgcgctgcg

SEQ ID NO: 8402 - RNA, 21 nt, synthetic construct
  source 1..21: mol_type = other RNA
gctgggcacggagggcaggat

SEQ ID NO: 8403 - RNA, 21 nt, synthetic construct
  source 1..21: mol_type = other RNA
gctgggcgaggaggtgccacg

SEQ ID NO: 8404 - RNA, 21 nt, synthetic construct
  source 1..21: mol_type = other RNA
gcttccgggtagagtcgcgtg

SEQ ID NO: 8405 - RNA, 21 nt, synthetic construct
  source 1..21: mol_type = other RNA
gcttggccagcgccgacttag

SEQ ID NO: 8406 - RNA, 21 nt, synthetic construct
  source 1..21: mol_type = other RNA
ggaaaccaggcgtttcaggct

SEQ ID NO: 8407 - RNA, 21 nt, synthetic construct
  source 1..21: mol_type = other RNA
ggaagctctcgcagtacttgg

SEQ ID NO: 8408 - RNA, 21 nt, synthetic construct
  source 1..21: mol_type = other RNA
ggaaggaggccgaggttcaga

SEQ ID NO: 8409 - RNA, 21 nt, synthetic construct
  source 1..21: mol_type = other RNA
ggagaaaccgatctgctgcag

SEQ ID NO: 8410 - RNA, 21 nt, synthetic construct
  source 1..21: mol_type = other RNA
ggaggccgaggttcagacgtg

SEQ ID NO: 8411 - RNA, 21 nt, synthetic construct
  source 1..21: mol_type = other RNA
ggaggcgtatcccacgcgact

SEQ ID NO: 8412 - RNA, 21 nt, synthetic construct
  source 1..21: mol_type = other RNA
ggagggcaggatgggccgtgg

SEQ ID NO: 8413 - RNA, 21 nt, synthetic construct
  source 1..21: mol_type = other RNA
ggaggtgccacggcccatcct

SEQ ID NO: 8414 - RNA, 21 nt, synthetic construct
  source 1..21: mol_type = other RNA
ggatgggccgtggcacctcct

SEQ ID NO: 8415 - RNA, 21 nt, synthetic construct
  source 1..21: mol_type = other RNA
ggcacctcctcgcccagcagg

SEQ ID NO: 8416 - RNA, 21 nt, synthetic construct
  source 1..21: mol_type = other RNA
ggcacggagggcaggatgggc

SEQ ID NO: 8417 - RNA, 21 nt, synthetic construct
  source 1..21: mol_type = other RNA
ggcactaagtcggcgctggcc

SEQ ID NO: 8418 - RNA, 21 nt, synthetic construct
  source 1..21: mol_type = other RNA
ggcaggatgggccgtggcacc

SEQ ID NO: 8419 - RNA, 21 nt, synthetic construct
  source 1..21: mol_type = other RNA
ggccaagcgcgcgctgcgcct

SEQ ID NO: 8420 - RNA, 21 nt, synthetic construct
  source 1..21: mol_type = other RNA
ggccagcgccgacttagtgcc

SEQ ID NO: 8421 - RNA, 21 nt, synthetic construct
  source 1..21: mol_type = other RNA
ggcccatcctgccctccgtgc

SEQ ID NO: 8422 - RNA, 21 nt, synthetic construct
  source 1..21: mol_type = other RNA
ggccgaggttcagacgtggct

SEQ ID NO: 8423 - RNA, 21 nt, synthetic construct
  source 1..21: mol_type = other RNA
ggccgtggcacctcctcgccc

SEQ ID NO: 8424 - RNA, 21 nt, synthetic construct
  source 1..21: mol_type = other RNA
ggcctccttccagctgggcac

SEQ ID NO: 8425 - RNA, 21 nt, synthetic construct
  source 1..21: mol_type = other RNA
ggcgaggaggtgccacggccc

SEQ ID NO: 8426 - RNA, 21 nt, synthetic construct
  source 1..21: mol_type = other RNA
ggcgcagcgcgcgcttggcca

SEQ ID NO: 8427 - RNA, 21 nt, synthetic construct
  source 1..21: mol_type = other RNA
ggcgccatccagagcctgaaa

SEQ ID NO: 8428 - RNA, 21 nt, synthetic construct
  source 1..21: mol_type = other RNA
ggcgctggccaagcgcgcgct

SEQ ID NO: 8429 - RNA, 21 nt, synthetic construct
  source 1..21: mol_type = other RNA
ggcgtatcccacgcgactcta

SEQ ID NO: 8430 - RNA, 21 nt, synthetic construct
  source 1..21: mol_type = other RNA
ggcgtttcaggctctggatgg

SEQ ID NO: 8431 - RNA, 21 nt, synthetic construct
  source 1..21: mol_type = other RNA
ggctctggatggcgccgatgt

SEQ ID NO: 8432 - RNA, 21 nt, synthetic construct
  source 1..21: mol_type = other RNA
ggctgcagcagatcggtttct

SEQ ID NO: 8433 - RNA, 21 nt, synthetic construct
  source 1..21: mol_type = other RNA
gggaggcgtatcccacgcgac

SEQ ID NO: 8434 - RNA, 21 nt, synthetic construct
  source 1..21: mol_type = other RNA
gggcacggagggcaggatggg

SEQ ID NO: 8435 - RNA, 21 nt, synthetic construct
  source 1..21: mol_type = other RNA
gggcaggatgggccgtggcac

SEQ ID NO: 8436 - RNA, 21 nt, synthetic construct
  source 1..21: mol_type = other RNA
gggccgtggcacctcctcgcc

SEQ ID NO: 8437 - RNA, 21 nt, synthetic construct
  source 1..21: mol_type = other RNA
gggcgaggaggtgccacggcc

SEQ ID NO: 8438 - RNA, 21 nt, synthetic construct
  source 1..21: mol_type = other RNA
ggggaggcgtatcccacgcga

SEQ ID NO: 8439 - RNA, 21 nt, synthetic construct
  source 1..21: mol_type = other RNA
gggggaggcgtatcccacgcg

SEQ ID NO: 8440 - RNA, 21 nt, synthetic construct
  source 1..21: mol_type = other RNA
gggtagagtcgcgtgggatac

SEQ ID NO: 8441 - RNA, 21 nt, synthetic construct
  source 1..21: mol_type = other RNA
ggtagagtaggaaaccaggcg

SEQ ID NO: 8442 - RNA, 21 nt, synthetic construct
  source 1..21: mol_type = other RNA
ggtagagtcgcgtgggatacg

SEQ ID NO: 8443 - RNA, 21 nt, synthetic construct
  source 1..21: mol_type = other RNA
ggtgccacggcccatcctgcc

SEQ ID NO: 8444 - RNA, 21 nt, synthetic construct
  source 1..21: mol_type = other RNA
ggttcagacgtggctgcagca

SEQ ID NO: 8445 - RNA, 21 nt, synthetic construct
  source 1..21: mol_type = other RNA
ggtttcctactctaccaatgg

SEQ ID NO: 8446 - RNA, 21 nt, synthetic construct
  source 1..21: mol_type = other RNA
ggtttctccaagtactgcgag

SEQ ID NO: 8447 - RNA, 21 nt, synthetic construct
  source 1..21: mol_type = other RNA
gtactgcgagagcttccgggt

SEQ ID NO: 8448 - RNA, 21 nt, synthetic construct
  source 1..21: mol_type = other RNA
gtacttggagaaaccgatctg

SEQ ID NO: 8449 - RNA, 21 nt, synthetic construct
  source 1..21: mol_type = other RNA
gtagagtaggaaaccaggcgt

SEQ ID NO: 8450 - RNA, 21 nt, synthetic construct
  source 1..21: mol_type = other RNA
gtagagtcgcgtgggatacgc

SEQ ID NO: 8451 - RNA, 21 nt, synthetic construct
  source 1..21: mol_type = other RNA
gtaggaaaccaggcgtttcag

SEQ ID NO: 8452 - RNA, 21 nt, synthetic construct
  source 1..21: mol_type = other RNA
gtatcccacgcgactctaccc

SEQ ID NO: 8453 - RNA, 21 nt, synthetic construct
  source 1..21: mol_type = other RNA
gtcggcgctggccaagcgcgc

SEQ ID NO: 8454 - RNA, 21 nt, synthetic construct
  source 1..21: mol_type = other RNA
gtctgaacctcggcctccttc

SEQ ID NO: 8455 - RNA, 21 nt, synthetic construct
  source 1..21: mol_type = other RNA
gtgccacggcccatcctgccc

SEQ ID NO: 8456 - RNA, 21 nt, synthetic construct
  source 1..21: mol_type = other RNA
gtgccattggtagagtaggaa

SEQ ID NO: 8457 - RNA, 21 nt, synthetic construct
  source 1..21: mol_type = other RNA
gtgcccagctggaaggaggcc

SEQ ID NO: 8458 - RNA, 21 nt, synthetic construct
  source 1..21: mol_type = other RNA
gtggcacctcctcgcccagca

SEQ ID NO: 8459 - RNA, 21 nt, synthetic construct
  source 1..21: mol_type = other RNA
gtggctgcagcagatcggttt

SEQ ID NO: 8460 - RNA, 21 nt, synthetic construct
  source 1..21: mol_type = other RNA
gtgttcagcgacatcggcgcc

SEQ ID NO: 8461 - RNA, 21 nt, synthetic construct
  source 1..21: mol_type = other RNA
gttcagacgtggctgcagcag

SEQ ID NO: 8462 - RNA, 21 nt, synthetic construct
  source 1..21: mol_type = other RNA
gttcagcgacatcggcgccat

SEQ ID NO: 8463 - RNA, 21 nt, synthetic construct
  source 1..21: mol_type = other RNA
gtttcaggctctggatggcgc

SEQ ID NO: 8464 - RNA, 21 nt, synthetic construct
  source 1..21: mol_type = other RNA
gtttcctactctaccaatggc

SEQ ID NO: 8465 - RNA, 21 nt, synthetic construct
  source 1..21: mol_type = other RNA
gtttctccaagtactgcgaga

SEQ ID NO: 8466 - RNA, 21 nt, synthetic construct
  source 1..21: mol_type = other RNA
taagtcggcgctggccaagcg

SEQ ID NO: 8467 - RNA, 21 nt, synthetic construct
  source 1..21: mol_type = other RNA
taccaatggcactaagtcggc

SEQ ID NO: 8468 - RNA, 21 nt, synthetic construct
  source 1..21: mol_type = other RNA
tacccggaagctctcgcagta

SEQ ID NO: 8469 - RNA, 21 nt, synthetic construct
  source 1..21: mol_type = other RNA
tactctaccaatggcactaag

SEQ ID NO: 8470 - RNA, 21 nt, synthetic construct
  source 1..21: mol_type = other RNA
tactgcgagagcttccgggta

SEQ ID NO: 8471 - RNA, 21 nt, synthetic construct
  source 1..21: mol_type = other RNA
tacttggagaaaccgatctgc

SEQ ID NO: 8472 - RNA, 21 nt, synthetic construct
  source 1..21: mol_type = other RNA
tagagtaggaaaccaggcgtt

SEQ ID NO: 8473 - RNA, 21 nt, synthetic construct
  source 1..21: mol_type = other RNA
taggaaaccaggcgtttcagg

SEQ ID NO: 8474 - RNA, 21 nt, synthetic construct
  source 1..21: mol_type = other RNA
tagtgccattggtagagtagg

SEQ ID NO: 8475 - RNA, 21 nt, synthetic construct
  source 1..21: mol_type = other RNA
tatcccacgcgactctacccg

SEQ ID NO: 8476 - RNA, 21 nt, synthetic construct
  source 1..21: mol_type = other RNA
tcagacgtggctgcagcagat

SEQ ID NO: 8477 - RNA, 21 nt, synthetic construct
  source 1..21: mol_type = other RNA
tcagcgacatcggcgccatcc

SEQ ID NO: 8478 - RNA, 21 nt, synthetic construct
  source 1..21: mol_type = other RNA
tcaggctctggatggcgccga

SEQ ID NO: 8479 - RNA, 21 nt, synthetic construct
  source 1..21: mol_type = other RNA
tccaagtactgcgagagcttc

SEQ ID NO: 8480 - RNA, 21 nt, synthetic construct
  source 1..21: mol_type = other RNA
tccagagcctgaaacgcctgg

SEQ ID NO: 8481 - RNA, 21 nt, synthetic construct
  source 1..21: mol_type = other RNA
tccagctgggcacggagggca

SEQ ID NO: 8482 - RNA, 21 nt, synthetic construct
  source 1..21: mol_type = other RNA
tcccacgcgactctacccgga

SEQ ID NO: 8483 - RNA, 21 nt, synthetic construct
  source 1..21: mol_type = other RNA
tccgggtagagtcgcgtggga

SEQ ID NO: 8484 - RNA, 21 nt, synthetic construct
  source 1..21: mol_type = other RNA
tccgtgcccagctggaaggag

SEQ ID NO: 8485 - RNA, 21 nt, synthetic construct
  source 1..21: mol_type = other RNA
tcctactctaccaatggcact

SEQ ID NO: 8486 - RNA, 21 nt, synthetic construct
  source 1..21: mol_type = other RNA
tcctcgcccagcaggcgcagc

SEQ ID NO: 8487 - RNA, 21 nt, synthetic construct
  source 1..21: mol_type = other RNA
tcctgccctccgtgcccagct

SEQ ID NO: 8488 - RNA, 21 nt, synthetic construct
  source 1..21: mol_type = other RNA
tccttccagctgggcacggag

SEQ ID NO: 8489 - RNA, 21 nt, synthetic construct
  source 1..21: mol_type = other RNA
tcgcagtacttggagaaaccg

SEQ ID NO: 8490 - RNA, 21 nt, synthetic construct
  source 1..21: mol_type = other RNA
tcgcccagcaggcgcagcgcg

SEQ ID NO: 8491 - RNA, 21 nt, synthetic construct
  source 1..21: mol_type = other RNA
tcggcctccttccagctgggc

SEQ ID NO: 8492 - RNA, 21 nt, synthetic construct
  source 1..21: mol_type = other RNA
tcggcgccatccagagcctga

SEQ ID NO: 8493 - RNA, 21 nt, synthetic construct
  source 1..21: mol_type = other RNA
tcggcgctggccaagcgcgcg

SEQ ID NO: 8494 - RNA, 21 nt, synthetic construct
  source 1..21: mol_type = other RNA
tcggtttctccaagtactgcg

SEQ ID NO: 8495 - RNA, 21 nt, synthetic construct
  source 1..21: mol_type = other RNA
tctaccaatggcactaagtcg

SEQ ID NO: 8496 - RNA, 21 nt, synthetic construct
  source 1..21: mol_type = other RNA
tctacccggaagctctcgcag

SEQ ID NO: 8497 - RNA, 21 nt, synthetic construct
  source 1..21: mol_type = other RNA
tctccaagtactgcgagagct

SEQ ID NO: 8498 - RNA, 21 nt, synthetic construct
  source 1..21: mol_type = other RNA
tctcgcagtacttggagaaac

SEQ ID NO: 8499 - RNA, 21 nt, synthetic construct
  source 1..21: mol_type = other RNA
tctgaacctcggcctccttcc

SEQ ID NO: 8500 - RNA, 21 nt, synthetic construct
  source 1..21: mol_type = other RNA
tctgctgcagccacgtctgaa

SEQ ID NO: 8501 - RNA, 21 nt, synthetic construct
  source 1..21: mol_type = other RNA
tgaaacgcctggtttcctact

SEQ ID NO: 8502 - RNA, 21 nt, synthetic construct
  source 1..21: mol_type = other RNA
tgaacctcggcctccttccag

SEQ ID NO: 8503 - RNA, 21 nt, synthetic construct
  source 1..21: mol_type = other RNA
tgcagcagatcggtttctcca

SEQ ID NO: 8504 - RNA, 21 nt, synthetic construct
  source 1..21: mol_type = other RNA
tgcagccacgtctgaacctcg

SEQ ID NO: 8505 - RNA, 21 nt, synthetic construct
  source 1..21: mol_type = other RNA
tgccacggcccatcctgccct

SEQ ID NO: 8506 - RNA, 21 nt, synthetic construct
  source 1..21: mol_type = other RNA
tgccattggtagagtaggaaa

SEQ ID NO: 8507 - RNA, 21 nt, synthetic construct
  source 1..21: mol_type = other RNA
tgcccagctggaaggaggccg

SEQ ID NO: 8508 - RNA, 21 nt, synthetic construct
  source 1..21: mol_type = other RNA
tgccctccgtgcccagctgga

SEQ ID NO: 8509 - RNA, 21 nt, synthetic construct
  source 1..21: mol_type = other RNA
tgcgagagcttccgggtagag

SEQ ID NO: 8510 - RNA, 21 nt, synthetic construct
  source 1..21: mol_type = other RNA
tgcgcctgctgggcgaggagg

SEQ ID NO: 8511 - RNA, 21 nt, synthetic construct
  source 1..21: mol_type = other RNA
tgctgcagccacgtctgaacc

SEQ ID NO: 8512 - RNA, 21 nt, synthetic construct
  source 1..21: mol_type = other RNA
tgctgggcgaggaggtgccac

SEQ ID NO: 8513 - RNA, 21 nt, synthetic construct
  source 1..21: mol_type = other RNA
tggaaggaggccgaggttcag

SEQ ID NO: 8514 - RNA, 21 nt, synthetic construct
  source 1..21: mol_type = other RNA
tggagaaaccgatctgctgca

SEQ ID NO: 8515 - RNA, 21 nt, synthetic construct
  source 1..21: mol_type = other RNA
tggcacctcctcgcccagcag

SEQ ID NO: 8516 - RNA, 21 nt, synthetic construct
  source 1..21: mol_type = other RNA
tggcactaagtcggcgctggc

SEQ ID NO: 8517 - RNA, 21 nt, synthetic construct
  source 1..21: mol_type = other RNA
tggccaagcgcgcgctgcgcc

SEQ ID NO: 8518 - RNA, 21 nt, synthetic construct
  source 1..21: mol_type = other RNA
tggccagcgccgacttagtgc

SEQ ID NO: 8519 - RNA, 21 nt, synthetic construct
  source 1..21: mol_type = other RNA
tggctgcagcagatcggtttc

SEQ ID NO: 8520 - RNA, 21 nt, synthetic construct
  source 1..21: mol_type = other RNA
tgggcacggagggcaggatgg

SEQ ID NO: 8521 - RNA, 21 nt, synthetic construct
  source 1..21: mol_type = other RNA
tgggccgtggcacctcctcgc

SEQ ID NO: 8522 - RNA, 21 nt, synthetic construct
  source 1..21: mol_type = other RNA
tgggcgaggaggtgccacggc

SEQ ID NO: 8523 - RNA, 21 nt, synthetic construct
  source 1..21: mol_type = other RNA
tggtagagtaggaaaccaggc

SEQ ID NO: 8524 - RNA, 21 nt, synthetic construct
  source 1..21: mol_type = other RNA
tggtttcctactctaccaatg

SEQ ID NO: 8525 - RNA, 21 nt, synthetic construct
  source 1..21: mol_type = other RNA
tgttcagcgacatcggcgcca

SEQ ID NO: 8526 - RNA, 21 nt, synthetic construct
  source 1..21: mol_type = other RNA
ttagtgccattggtagagtag

SEQ ID NO: 8527 - RNA, 21 nt, synthetic construct
  source 1..21: mol_type = other RNA
ttcagacgtggctgcagcaga

SEQ ID NO: 8528 - RNA, 21 nt, synthetic construct
  source 1..21: mol_type = other RNA
ttcagcgacatcggcgccatc

SEQ ID NO: 8529 - RNA, 21 nt, synthetic construct
  source 1..21: mol_type = other RNA
ttcaggctctggatggcgccg

SEQ ID NO: 8530 - RNA, 21 nt, synthetic construct
  source 1..21: mol_type = other RNA
ttccagctgggcacggagggc

SEQ ID NO: 8531 - RNA, 21 nt, synthetic construct
  source 1..21: mol_type = other RNA
ttccgggtagagtcgcgtggg

SEQ ID NO: 8532 - RNA, 21 nt, synthetic construct
  source 1..21: mol_type = other RNA
ttcctactctaccaatggcac

SEQ ID NO: 8533 - RNA, 21 nt, synthetic construct
  source 1..21: mol_type = other RNA
ttctccaagtactgcgagagc

SEQ ID NO: 8534 - RNA, 21 nt, synthetic construct
  source 1..21: mol_type = other RNA
ttggagaaaccgatctgctgc

SEQ ID NO: 8535 - RNA, 21 nt, synthetic construct
  source 1..21: mol_type = other RNA
ttggccagcgccgacttagtg

SEQ ID NO: 8536 - RNA, 21 nt, synthetic construct
  source 1..21: mol_type = other RNA
ttggtagagtaggaaaccagg

SEQ ID NO: 8537 - RNA, 21 nt, synthetic construct
  source 1..21: mol_type = other RNA
tttcaggctctggatggcgcc

SEQ ID NO: 8538 - RNA, 21 nt, synthetic construct
  source 1..21: mol_type = other RNA
tttcctactctaccaatggca

SEQ ID NO: 8539 - RNA, 21 nt, synthetic construct
  source 1..21: mol_type = other RNA
tttctccaagtactgcgagag

SEQ ID NO: 8540 - RNA, 22 nt, synthetic construct
  source 1..22: mol_type = other RNA
aaaccaggcgtttcaggctctg

SEQ ID NO: 8541 - RNA, 22 nt, synthetic construct
  source 1..22: mol_type = other RNA
aaaccgatctgctgcagccacg

SEQ ID NO: 8542 - RNA, 22 nt, synthetic construct
  source 1..22: mol_type = other RNA
aaacgcctggtttcctactcta

SEQ ID NO: 8543 - RNA, 22 nt, synthetic construct
  source 1..22: mol_type = other RNA
aaccaggcgtttcaggctctgg

SEQ ID NO: 8544 - RNA, 22 nt, synthetic construct
  source 1..22: mol_type = other RNA
aaccgatctgctgcagccacgt

SEQ ID NO: 8545 - RNA, 22 nt, synthetic construct
  source 1..22: mol_type = other RNA
aacctcggcctccttccagctg

SEQ ID NO: 8546 - RNA, 22 nt, synthetic construct
  source 1..22: mol_type = other RNA
aacgcctggtttcctactctac

SEQ ID NO: 8547 - RNA, 22 nt, synthetic construct
  source 1..22: mol_type = other RNA
aagcgcgcgctgcgcctgctgg

SEQ ID NO: 8548 - RNA, 22 nt, synthetic construct
  source 1..22: mol_type = other RNA
aagctctcgcagtacttggaga

SEQ ID NO: 8549 - RNA, 22 nt, synthetic construct
  source 1..22: mol_type = other RNA
aaggaggccgaggttcagacgt

SEQ ID NO: 8550 - RNA, 22 nt, synthetic construct
  source 1..22: mol_type = other RNA
aagtactgcgagagcttccggg

SEQ ID NO: 8551 - RNA, 22 nt, synthetic construct
  source 1..22: mol_type = other RNA
aagtcggcgctggccaagcgcg

SEQ ID NO: 8552 - RNA, 22 nt, synthetic construct
  source 1..22: mol_type = other RNA
aatggcactaagtcggcgctgg

SEQ ID NO: 8553 - RNA, 22 nt, synthetic construct
  source 1..22: mol_type = other RNA
acatcggcgccatccagagcct

SEQ ID NO: 8554 - RNA, 22 nt, synthetic construct
  source 1..22: mol_type = other RNA
accaatggcactaagtcggcgc

SEQ ID NO: 8555 - RNA, 22 nt, synthetic construct
  source 1..22: mol_type = other RNA
accaggcgtttcaggctctgga

SEQ ID NO: 8556 - RNA, 22 nt, synthetic construct
  source 1..22: mol_type = other RNA
acccggaagctctcgcagtact

SEQ ID NO: 8557 - RNA, 22 nt, synthetic construct
  source 1..22: mol_type = other RNA
accgatctgctgcagccacgtc

SEQ ID NO: 8558 - RNA, 22 nt, synthetic construct
  source 1..22: mol_type = other RNA
acctcctcgcccagcaggcgca

SEQ ID NO: 8559 - RNA, 22 nt, synthetic construct
  source 1..22: mol_type = other RNA
acctcggcctccttccagctgg

SEQ ID NO: 8560 - RNA, 22 nt, synthetic construct
  source 1..22: mol_type = other RNA
acgcctggtttcctactctacc

SEQ ID NO: 8561 - RNA, 22 nt, synthetic construct
  source 1..22: mol_type = other RNA
acgcgactctacccggaagctc

SEQ ID NO: 8562 - RNA, 22 nt, synthetic construct
  source 1..22: mol_type = other RNA
acggagggcaggatgggccgtg

SEQ ID NO: 8563 - RNA, 22 nt, synthetic construct
  source 1..22: mol_type = other RNA
acggcccatcctgccctccgtg

SEQ ID NO: 8564 - RNA, 22 nt, synthetic construct
  source 1..22: mol_type = other RNA
acgtctgaacctcggcctcctt

SEQ ID NO: 8565 - RNA, 22 nt, synthetic construct
  source 1..22: mol_type = other RNA
acgtggctgcagcagatcggtt

SEQ ID NO: 8566 - RNA, 22 nt, synthetic construct
  source 1..22: mol_type = other RNA
actaagtcggcgctggccaagc

SEQ ID NO: 8567 - RNA, 22 nt, synthetic construct
  source 1..22: mol_type = other RNA
actctaccaatggcactaagtc

SEQ ID NO: 8568 - RNA, 22 nt, synthetic construct
  source 1..22: mol_type = other RNA
actctacccggaagctctcgca

SEQ ID NO: 8569 - RNA, 22 nt, synthetic construct
  source 1..22: mol_type = other RNA
actgcgagagcttccgggtaga

SEQ ID NO: 8570 - RNA, 22 nt, synthetic construct
  source 1..22: mol_type = other RNA
acttagtgccattggtagagta

SEQ ID NO: 8571 - RNA, 22 nt, synthetic construct
  source 1..22: mol_type = other RNA
acttggagaaaccgatctgctg

SEQ ID NO: 8572 - RNA, 22 nt, synthetic construct
  source 1..22: mol_type = other RNA
agaaaccgatctgctgcagcca

SEQ ID NO: 8573 - RNA, 22 nt, synthetic construct
  source 1..22: mol_type = other RNA
agacgtggctgcagcagatcgg

SEQ ID NO: 8574 - RNA, 22 nt, synthetic construct
  source 1..22: mol_type = other RNA
agagcctgaaacgcctggtttc

SEQ ID NO: 8575 - RNA, 22 nt, synthetic construct
  source 1..22: mol_type = other RNA
agagcttccgggtagagtcgcg

SEQ ID NO: 8576 - RNA, 22 nt, synthetic construct
  source 1..22: mol_type = other RNA
agagtaggaaaccaggcgtttc

SEQ ID NO: 8577 - RNA, 22 nt, synthetic construct
  source 1..22: mol_type = other RNA
agatcggtttctccaagtactg

SEQ ID NO: 8578 - RNA, 22 nt, synthetic construct
  source 1..22: mol_type = other RNA
agcagatcggtttctccaagta

SEQ ID NO: 8579 - RNA, 22 nt, synthetic construct
  source 1..22: mol_type = other RNA
agcaggcgcagcgcgcgcttgg

SEQ ID NO: 8580 - RNA, 22 nt, synthetic construct
  source 1..22: mol_type = other RNA
agccacgtctgaacctcggcct

SEQ ID NO: 8581 - RNA, 22 nt, synthetic construct
  source 1..22: mol_type = other RNA
agcctgaaacgcctggtttcct

SEQ ID NO: 8582 - RNA, 22 nt, synthetic construct
  source 1..22: mol_type = other RNA
agcgacatcggcgccatccaga

SEQ ID NO: 8583 - RNA, 22 nt, synthetic construct
  source 1..22: mol_type = other RNA
agcgccgacttagtgccattgg

SEQ ID NO: 8584 - RNA, 22 nt, synthetic construct
  source 1..22: mol_type = other RNA
agcgcgcgctgcgcctgctggg

SEQ ID NO: 8585 - RNA, 22 nt, synthetic construct
  source 1..22: mol_type = other RNA
agcgcgcgcttggccagcgccg

SEQ ID NO: 8586 - RNA, 22 nt, synthetic construct
  source 1..22: mol_type = other RNA
agctctcgcagtacttggagaa

SEQ ID NO: 8587 - RNA, 22 nt, synthetic construct
  source 1..22: mol_type = other RNA
agctggaaggaggccgaggttc

SEQ ID NO: 8588 - RNA, 22 nt, synthetic construct
  source 1..22: mol_type = other RNA
agctgggcacggagggcaggat

SEQ ID NO: 8589 - RNA, 22 nt, synthetic construct
  source 1..22: mol_type = other RNA
agcttccgggtagagtcgcgtg

SEQ ID NO: 8590 - RNA, 22 nt, synthetic construct
  source 1..22: mol_type = other RNA
aggaaaccaggcgtttcaggct

SEQ ID NO: 8591 - RNA, 22 nt, synthetic construct
  source 1..22: mol_type = other RNA
aggaggccgaggttcagacgtg

SEQ ID NO: 8592 - RNA, 22 nt, synthetic construct
  source 1..22: mol_type = other RNA
aggaggtgccacggcccatcct

SEQ ID NO: 8593 - RNA, 22 nt, synthetic construct
  source 1..22: mol_type = other RNA
aggatgggccgtggcacctcct

SEQ ID NO: 8594 - RNA, 22 nt, synthetic construct
  source 1..22: mol_type = other RNA
aggccgaggttcagacgtggct

SEQ ID NO: 8595 - RNA, 22 nt, synthetic construct
  source 1..22: mol_type = other RNA
aggcgcagcgcgcgcttggcca

SEQ ID NO: 8596 - RNA, 22 nt, synthetic construct
  source 1..22: mol_type = other RNA
aggcgtatcccacgcgactcta

SEQ ID NO: 8597 - RNA, 22 nt, synthetic construct
  source 1..22: mol_type = other RNA
aggcgtttcaggctctggatgg

SEQ ID NO: 8598 - RNA, 22 nt, synthetic construct
  source 1..22: mol_type = other RNA
aggctctggatggcgccgatgt

SEQ ID NO: 8599 - RNA, 22 nt, synthetic construct
  source 1..22: mol_type = other RNA
agggcaggatgggccgtggcac

SEQ ID NO: 8600 - RNA, 22 nt, synthetic construct
  source 1..22: mol_type = other RNA
aggtgccacggcccatcctgcc

SEQ ID NO: 8601 - RNA, 22 nt, synthetic construct
  source 1..22: mol_type = other RNA
aggttcagacgtggctgcagca

SEQ ID NO: 8602 - RNA, 22 nt, synthetic construct
  source 1..22: mol_type = other RNA
agtactgcgagagcttccgggt

SEQ ID NO: 8603 - RNA, 22 nt, synthetic construct
  source 1..22: mol_type = other RNA
agtacttggagaaaccgatctg

SEQ ID NO: 8604 - RNA, 22 nt, synthetic construct
  source 1..22: mol_type = other RNA
agtaggaaaccaggcgtttcag

SEQ ID NO: 8605 - RNA, 22 nt, synthetic construct
  source 1..22: mol_type = other RNA
agtcggcgctggccaagcgcgc

SEQ ID NO: 8606 - RNA, 22 nt, synthetic construct
  source 1..22: mol_type = other RNA
agtgccattggtagagtaggaa

SEQ ID NO: 8607 - RNA, 22 nt, synthetic construct
  source 1..22: mol_type = other RNA
atccagagcctgaaacgcctgg

SEQ ID NO: 8608 - RNA, 22 nt, synthetic construct
  source 1..22: mol_type = other RNA
atcccacgcgactctacccgga

SEQ ID NO: 8609 - RNA, 22 nt, synthetic construct
  source 1..22: mol_type = other RNA
atcctgccctccgtgcccagct

SEQ ID NO: 8610 - RNA, 22 nt, synthetic construct
  source 1..22: mol_type = other RNA
atcggcgccatccagagcctga

SEQ ID NO: 8611 - RNA, 22 nt, synthetic construct
  source 1..22: mol_type = other RNA
atcggtttctccaagtactgcg

SEQ ID NO: 8612 - RNA, 22 nt, synthetic construct
  source 1..22: mol_type = other RNA
atctgctgcagccacgtctgaa

SEQ ID NO: 8613 - RNA, 22 nt, synthetic construct
  source 1..22: mol_type = other RNA
atggcactaagtcggcgctggc

SEQ ID NO: 8614 - RNA, 22 nt, synthetic construct
  source 1..22: mol_type = other RNA
atgggccgtggcacctcctcgc

SEQ ID NO: 8615 - RNA, 22 nt, synthetic construct
  source 1..22: mol_type = other RNA
attggtagagtaggaaaccagg

SEQ ID NO: 8616 - RNA, 22 nt, synthetic construct
  source 1..22: mol_type = other RNA
caagcgcgcgctgcgcctgctg

SEQ ID NO: 8617 - RNA, 22 nt, synthetic construct
  source 1..22: mol_type = other RNA
caagtactgcgagagcttccgg

SEQ ID NO: 8618 - RNA, 22 nt, synthetic construct
  source 1..22: mol_type = other RNA
caatggcactaagtcggcgctg

SEQ ID NO: 8619 - RNA, 22 nt, synthetic construct
  source 1..22: mol_type = other RNA
cacctcctcgcccagcaggcgc

SEQ ID NO: 8620 - RNA, 22 nt, synthetic construct
  source 1..22: mol_type = other RNA
cacgcgactctacccggaagct

SEQ ID NO: 8621 - RNA, 22 nt, synthetic construct
  source 1..22: mol_type = other RNA
cacggagggcaggatgggccgt

SEQ ID NO: 8622 - RNA, 22 nt, synthetic construct
  source 1..22: mol_type = other RNA
cacggcccatcctgccctccgt

SEQ ID NO: 8623 - RNA, 22 nt, synthetic construct
  source 1..22: mol_type = other RNA
cacgtctgaacctcggcctcct

SEQ ID NO: 8624 - RNA, 22 nt, synthetic construct
  source 1..22: mol_type = other RNA
cactaagtcggcgctggccaag

SEQ ID NO: 8625 - RNA, 22 nt, synthetic construct
  source 1..22: mol_type = other RNA
cagacgtggctgcagcagatcg

SEQ ID NO: 8626 - RNA, 22 nt, synthetic construct
  source 1..22: mol_type = other RNA
cagagcctgaaacgcctggttt

SEQ ID NO: 8627 - RNA, 22 nt, synthetic construct
  source 1..22: mol_type = other RNA
cagatcggtttctccaagtact

SEQ ID NO: 8628 - RNA, 22 nt, synthetic construct
  source 1..22: mol_type = other RNA
cagcagatcggtttctccaagt

SEQ ID NO: 8629 - RNA, 22 nt, synthetic construct
  source 1..22: mol_type = other RNA
cagcaggcgcagcgcgcgcttg

SEQ ID NO: 8630 - RNA, 22 nt, synthetic construct
  source 1..22: mol_type = other RNA
cagccacgtctgaacctcggcc

SEQ ID NO: 8631 - RNA, 22 nt, synthetic construct
  source 1..22: mol_type = other RNA
cagcgacatcggcgccatccag

SEQ ID NO: 8632 - RNA, 22 nt, synthetic construct
  source 1..22: mol_type = other RNA
cagcgccgacttagtgccattg

SEQ ID NO: 8633 - RNA, 22 nt, synthetic construct
  source 1..22: mol_type = other RNA
cagcgcgcgcttggccagcgcc

SEQ ID NO: 8634 - RNA, 22 nt, synthetic construct
  source 1..22: mol_type = other RNA
cagctggaaggaggccgaggtt

SEQ ID NO: 8635 - RNA, 22 nt, synthetic construct
  source 1..22: mol_type = other RNA
cagctgggcacggagggcagga

SEQ ID NO: 8636 - RNA, 22 nt, synthetic construct
  source 1..22: mol_type = other RNA
caggatgggccgtggcacctcc

SEQ ID NO: 8637 - RNA, 22 nt, synthetic construct
  source 1..22: mol_type = other RNA
caggcgcagcgcgcgcttggcc

SEQ ID NO: 8638 - RNA, 22 nt, synthetic construct
  source 1..22: mol_type = other RNA
caggcgtttcaggctctggatg

SEQ ID NO: 8639 - RNA, 22 nt, synthetic construct
  source 1..22: mol_type = other RNA
caggctctggatggcgccgatg

SEQ ID NO: 8640 - RNA, 22 nt, synthetic construct
  source 1..22: mol_type = other RNA
cagtacttggagaaaccgatct

SEQ ID NO: 8641 - RNA, 22 nt, synthetic construct
  source 1..22: mol_type = other RNA
catccagagcctgaaacgcctg

SEQ ID NO: 8642 - RNA, 22 nt, synthetic construct
  source 1..22: mol_type = other RNA
catcctgccctccgtgcccagc

SEQ ID NO: 8643 - RNA, 22 nt, synthetic construct
  source 1..22: mol_type = other RNA
catcggcgccatccagagcctg

SEQ ID NO: 8644 - RNA, 22 nt, synthetic construct
  source 1..22: mol_type = other RNA
cattggtagagtaggaaaccag

SEQ ID NO: 8645 - RNA, 22 nt, synthetic construct
  source 1..22: mol_type = other RNA
ccaagcgcgcgctgcgcctgct

SEQ ID NO: 8646 - RNA, 22 nt, synthetic construct
  source 1..22: mol_type = other RNA
ccaagtactgcgagagcttccg

SEQ ID NO: 8647 - RNA, 22 nt, synthetic construct
  source 1..22: mol_type = other RNA
ccaatggcactaagtcggcgct

SEQ ID NO: 8648 - RNA, 22 nt, synthetic construct
  source 1..22: mol_type = other RNA
ccacgcgactctacccggaagc

SEQ ID NO: 8649 - RNA, 22 nt, synthetic construct
  source 1..22: mol_type = other RNA
ccacggcccatcctgccctccg

SEQ ID NO: 8650 - RNA, 22 nt, synthetic construct
  source 1..22: mol_type = other RNA
ccacgtctgaacctcggcctcc

SEQ ID NO: 8651 - RNA, 22 nt, synthetic construct
  source 1..22: mol_type = other RNA
ccagagcctgaaacgcctggtt

SEQ ID NO: 8652 - RNA, 22 nt, synthetic construct
  source 1..22: mol_type = other RNA
ccagcaggcgcagcgcgcgctt

SEQ ID NO: 8653 - RNA, 22 nt, synthetic construct
  source 1..22: mol_type = other RNA
ccagcgccgacttagtgccatt

SEQ ID NO: 8654 - RNA, 22 nt, synthetic construct
  source 1..22: mol_type = other RNA
ccagctggaaggaggccgaggt

SEQ ID NO: 8655 - RNA, 22 nt, synthetic construct
  source 1..22: mol_type = other RNA
ccagctgggcacggagggcagg

SEQ ID NO: 8656 - RNA, 22 nt, synthetic construct
  source 1..22: mol_type = other RNA
ccaggcgtttcaggctctggat

SEQ ID NO: 8657 - RNA, 22 nt, synthetic construct
  source 1..22: mol_type = other RNA
ccatccagagcctgaaacgcct

SEQ ID NO: 8658 - RNA, 22 nt, synthetic construct
  source 1..22: mol_type = other RNA
ccatcctgccctccgtgcccag

SEQ ID NO: 8659 - RNA, 22 nt, synthetic construct
  source 1..22: mol_type = other RNA
ccattggtagagtaggaaacca

SEQ ID NO: 8660 - RNA, 22 nt, synthetic construct
  source 1..22: mol_type = other RNA
cccacgcgactctacccggaag

SEQ ID NO: 8661 - RNA, 22 nt, synthetic construct
  source 1..22: mol_type = other RNA
cccagcaggcgcagcgcgcgct

SEQ ID NO: 8662 - RNA, 22 nt, synthetic construct
  source 1..22: mol_type = other RNA
cccagctggaaggaggccgagg

SEQ ID NO: 8663 - RNA, 22 nt, synthetic construct
  source 1..22: mol_type = other RNA
cccatcctgccctccgtgccca

SEQ ID NO: 8664 - RNA, 22 nt, synthetic construct
  source 1..22: mol_type = other RNA
cccggaagctctcgcagtactt

SEQ ID NO: 8665 - RNA, 22 nt, synthetic construct
  source 1..22: mol_type = other RNA
ccctccgtgcccagctggaagg

SEQ ID NO: 8666 - RNA, 22 nt, synthetic construct
  source 1..22: mol_type = other RNA
ccgacttagtgccattggtaga

SEQ ID NO: 8667 - RNA, 22 nt, synthetic construct
  source 1..22: mol_type = other RNA
ccgaggttcagacgtggctgca

SEQ ID NO: 8668 - RNA, 22 nt, synthetic construct
  source 1..22: mol_type = other RNA
ccgatctgctgcagccacgtct

SEQ ID NO: 8669 - RNA, 22 nt, synthetic construct
  source 1..22: mol_type = other RNA
ccggaagctctcgcagtacttg

SEQ ID NO: 8670 - RNA, 22 nt, synthetic construct
  source 1..22: mol_type = other RNA
ccgggtagagtcgcgtgggata

SEQ ID NO: 8671 - RNA, 22 nt, synthetic construct
  source 1..22: mol_type = other RNA
ccgtgcccagctggaaggaggc

SEQ ID NO: 8672 - RNA, 22 nt, synthetic construct
  source 1..22: mol_type = other RNA
ccgtggcacctcctcgcccagc

SEQ ID NO: 8673 - RNA, 22 nt, synthetic construct
  source 1..22: mol_type = other RNA
cctactctaccaatggcactaa

SEQ ID NO: 8674 - RNA, 22 nt, synthetic construct
  source 1..22: mol_type = other RNA
cctccgtgcccagctggaagga

SEQ ID NO: 8675 - RNA, 22 nt, synthetic construct
  source 1..22: mol_type = other RNA
cctcctcgcccagcaggcgcag

SEQ ID NO: 8676 - RNA, 22 nt, synthetic construct
  source 1..22: mol_type = other RNA
cctccttccagctgggcacgga

SEQ ID NO: 8677 - RNA, 22 nt, synthetic construct
  source 1..22: mol_type = other RNA
cctcgcccagcaggcgcagcgc

SEQ ID NO: 8678 - RNA, 22 nt, synthetic construct
  source 1..22: mol_type = other RNA
cctcggcctccttccagctggg

SEQ ID NO: 8679 - RNA, 22 nt, synthetic construct
  source 1..22: mol_type = other RNA
cctgaaacgcctggtttcctac

SEQ ID NO: 8680 - RNA, 22 nt, synthetic construct
  source 1..22: mol_type = other RNA
cctgccctccgtgcccagctgg

SEQ ID NO: 8681 - RNA, 22 nt, synthetic construct
  source 1..22: mol_type = other RNA
cctgctgggcgaggaggtgcca

SEQ ID NO: 8682 - RNA, 22 nt, synthetic construct
  source 1..22: mol_type = other RNA
cctggtttcctactctaccaat

SEQ ID NO: 8683 - RNA, 22 nt, synthetic construct
  source 1..22: mol_type = other RNA
ccttccagctgggcacggaggg

SEQ ID NO: 8684 - RNA, 22 nt, synthetic construct
  source 1..22: mol_type = other RNA
cgacatcggcgccatccagagc

SEQ ID NO: 8685 - RNA, 22 nt, synthetic construct
  source 1..22: mol_type = other RNA
cgactctacccggaagctctcg

SEQ ID NO: 8686 - RNA, 22 nt, synthetic construct
  source 1..22: mol_type = other RNA
cgacttagtgccattggtagag

SEQ ID NO: 8687 - RNA, 22 nt, synthetic construct
  source 1..22: mol_type = other RNA
cgagagcttccgggtagagtcg

SEQ ID NO: 8688 - RNA, 22 nt, synthetic construct
  source 1..22: mol_type = other RNA
cgaggaggtgccacggcccatc

SEQ ID NO: 8689 - RNA, 22 nt, synthetic construct
  source 1..22: mol_type = other RNA
cgaggttcagacgtggctgcag

SEQ ID NO: 8690 - RNA, 22 nt, synthetic construct
  source 1..22: mol_type = other RNA
cgatctgctgcagccacgtctg

SEQ ID NO: 8691 - RNA, 22 nt, synthetic construct
  source 1..22: mol_type = other RNA
cgcagcgcgcgcttggccagcg

SEQ ID NO: 8692 - RNA, 22 nt, synthetic construct
  source 1..22: mol_type = other RNA
cgcagtacttggagaaaccgat

SEQ ID NO: 8693 - RNA, 22 nt, synthetic construct
  source 1..22: mol_type = other RNA
cgccatccagagcctgaaacgc

SEQ ID NO: 8694 - RNA, 22 nt, synthetic construct
  source 1..22: mol_type = other RNA
cgcccagcaggcgcagcgcgcg

SEQ ID NO: 8695 - RNA, 22 nt, synthetic construct
  source 1..22: mol_type = other RNA
cgccgacttagtgccattggta

SEQ ID NO: 8696 - RNA, 22 nt, synthetic construct
  source 1..22: mol_type = other RNA
cgcctgctgggcgaggaggtgc

SEQ ID NO: 8697 - RNA, 22 nt, synthetic construct
  source 1..22: mol_type = other RNA
cgcctggtttcctactctacca

SEQ ID NO: 8698 - RNA, 22 nt, synthetic construct
  source 1..22: mol_type = other RNA
cgcgactctacccggaagctct

SEQ ID NO: 8699 - RNA, 22 nt, synthetic construct
  source 1..22: mol_type = other RNA
cgcgcgctgcgcctgctgggcg

SEQ ID NO: 8700 - RNA, 22 nt, synthetic construct
  source 1..22: mol_type = other RNA
cgcgcgcttggccagcgccgac

SEQ ID NO: 8701 - RNA, 22 nt, synthetic construct
  source 1..22: mol_type = other RNA
cgcgctgcgcctgctgggcgag

SEQ ID NO: 8702 - RNA, 22 nt, synthetic construct
  source 1..22: mol_type = other RNA
cgcgcttggccagcgccgactt

SEQ ID NO: 8703 - RNA, 22 nt, synthetic construct
  source 1..22: mol_type = other RNA
cgctgcgcctgctgggcgagga

SEQ ID NO: 8704 - RNA, 22 nt, synthetic construct
  source 1..22: mol_type = other RNA
cgctggccaagcgcgcgctgcg

SEQ ID NO: 8705 - RNA, 22 nt, synthetic construct
  source 1..22: mol_type = other RNA
cgcttggccagcgccgacttag

SEQ ID NO: 8706 - RNA, 22 nt, synthetic construct
  source 1..22: mol_type = other RNA
cggaagctctcgcagtacttgg

SEQ ID NO: 8707 - RNA, 22 nt, synthetic construct
  source 1..22: mol_type = other RNA
cggagggcaggatgggccgtgg

SEQ ID NO: 8708 - RNA, 22 nt, synthetic construct
  source 1..22: mol_type = other RNA
cggcccatcctgccctccgtgc

SEQ ID NO: 8709 - RNA, 22 nt, synthetic construct
  source 1..22: mol_type = other RNA
cggcctccttccagctgggcac

SEQ ID NO: 8710 - RNA, 22 nt, synthetic construct
  source 1..22: mol_type = other RNA
cggcgccatccagagcctgaaa

SEQ ID NO: 8711 - RNA, 22 nt, synthetic construct
  source 1..22: mol_type = other RNA
cggcgctggccaagcgcgcgct

SEQ ID NO: 8712 - RNA, 22 nt, synthetic construct
  source 1..22: mol_type = other RNA
cgggggaggcgtatcccacgcg

SEQ ID NO: 8713 - RNA, 22 nt, synthetic construct
  source 1..22: mol_type = other RNA
cgggtagagtcgcgtgggatac

SEQ ID NO: 8714 - RNA, 22 nt, synthetic construct
  source 1..22: mol_type = other RNA
cggtttctccaagtactgcgag

SEQ ID NO: 8715 - RNA, 22 nt, synthetic construct
  source 1..22: mol_type = other RNA
cgtatcccacgcgactctaccc

SEQ ID NO: 8716 - RNA, 22 nt, synthetic construct
  source 1..22: mol_type = other RNA
cgtctgaacctcggcctccttc

SEQ ID NO: 8717 - RNA, 22 nt, synthetic construct
  source 1..22: mol_type = other RNA
cgtgcccagctggaaggaggcc

SEQ ID NO: 8718 - RNA, 22 nt, synthetic construct
  source 1..22: mol_type = other RNA
cgtggcacctcctcgcccagca

SEQ ID NO: 8719 - RNA, 22 nt, synthetic construct
  source 1..22: mol_type = other RNA
cgtggctgcagcagatcggttt

SEQ ID NO: 8720 - RNA, 22 nt, synthetic construct
  source 1..22: mol_type = other RNA
cgtttcaggctctggatggcgc

SEQ ID NO: 8721 - RNA, 22 nt, synthetic construct
  source 1..22: mol_type = other RNA
ctaagtcggcgctggccaagcg

SEQ ID NO: 8722 - RNA, 22 nt, synthetic construct
  source 1..22: mol_type = other RNA
ctaccaatggcactaagtcggc

SEQ ID NO: 8723 - RNA, 22 nt, synthetic construct
  source 1..22: mol_type = other RNA
ctacccggaagctctcgcagta

SEQ ID NO: 8724 - RNA, 22 nt, synthetic construct
  source 1..22: mol_type = other RNA
ctactctaccaatggcactaag

SEQ ID NO: 8725 - RNA, 22 nt, synthetic construct
  source 1..22: mol_type = other RNA
ctccaagtactgcgagagcttc

SEQ ID NO: 8726 - RNA, 22 nt, synthetic construct
  source 1..22: mol_type = other RNA
ctccgtgcccagctggaaggag

SEQ ID NO: 8727 - RNA, 22 nt, synthetic construct
  source 1..22: mol_type = other RNA
ctcctcgcccagcaggcgcagc

SEQ ID NO: 8728 - RNA, 22 nt, synthetic construct
  source 1..22: mol_type = other RNA
ctccttccagctgggcacggag

SEQ ID NO: 8729 - RNA, 22 nt, synthetic construct
  source 1..22: mol_type = other RNA
ctcgcagtacttggagaaaccg

SEQ ID NO: 8730 - RNA, 22 nt, synthetic construct
  source 1..22: mol_type = other RNA
ctcgcccagcaggcgcagcgcg

SEQ ID NO: 8731 - RNA, 22 nt, synthetic construct
  source 1..22: mol_type = other RNA
ctcggcctccttccagctgggc

SEQ ID NO: 8732 - RNA, 22 nt, synthetic construct
  source 1..22: mol_type = other RNA
ctctaccaatggcactaagtcg

SEQ ID NO: 8733 - RNA, 22 nt, synthetic construct
  source 1..22: mol_type = other RNA
ctctacccggaagctctcgcag

SEQ ID NO: 8734 - RNA, 22 nt, synthetic construct
  source 1..22: mol_type = other RNA
ctctcgcagtacttggagaaac

SEQ ID NO: 8735 - RNA, 22 nt, synthetic construct
  source 1..22: mol_type = other RNA
ctgaaacgcctggtttcctact

SEQ ID NO: 8736 - RNA, 22 nt, synthetic construct
  source 1..22: mol_type = other RNA
ctgaacctcggcctccttccag

SEQ ID NO: 8737 - RNA, 22 nt, synthetic construct
  source 1..22: mol_type = other RNA
ctgcagcagatcggtttctcca

SEQ ID NO: 8738 - RNA, 22 nt, synthetic construct
  source 1..22: mol_type = other RNA
ctgcagccacgtctgaacctcg

SEQ ID NO: 8739 - RNA, 22 nt, synthetic construct
  source 1..22: mol_type = other RNA
ctgccctccgtgcccagctgga

SEQ ID NO: 8740 - RNA, 22 nt, synthetic construct
  source 1..22: mol_type = other RNA
ctgcgagagcttccgggtagag

SEQ ID NO: 8741 - RNA, 22 nt, synthetic construct
  source 1..22: mol_type = other RNA
ctgcgcctgctgggcgaggagg

SEQ ID NO: 8742 - RNA, 22 nt, synthetic construct
  source 1..22: mol_type = other RNA
ctgctgcagccacgtctgaacc

SEQ ID NO: 8743 - RNA, 22 nt, synthetic construct
  source 1..22: mol_type = other RNA
ctgctgggcgaggaggtgccac

SEQ ID NO: 8744 - RNA, 22 nt, synthetic construct
  source 1..22: mol_type = other RNA
ctggaaggaggccgaggttcag

SEQ ID NO: 8745 - RNA, 22 nt, synthetic construct
  source 1..22: mol_type = other RNA
ctggccaagcgcgcgctgcgcc

SEQ ID NO: 8746 - RNA, 22 nt, synthetic construct
  source 1..22: mol_type = other RNA
ctgggcacggagggcaggatgg

SEQ ID NO: 8747 - RNA, 22 nt, synthetic construct
  source 1..22: mol_type = other RNA
ctgggcgaggaggtgccacggc

SEQ ID NO: 8748 - RNA, 22 nt, synthetic construct
  source 1..22: mol_type = other RNA
ctggtttcctactctaccaatg

SEQ ID NO: 8749 - RNA, 22 nt, synthetic construct
  source 1..22: mol_type = other RNA
cttagtgccattggtagagtag

SEQ ID NO: 8750 - RNA, 22 nt, synthetic construct
  source 1..22: mol_type = other RNA
cttccagctgggcacggagggc

SEQ ID NO: 8751 - RNA, 22 nt, synthetic construct
  source 1..22: mol_type = other RNA
cttccgggtagagtcgcgtggg

SEQ ID NO: 8752 - RNA, 22 nt, synthetic construct
  source 1..22: mol_type = other RNA
cttggagaaaccgatctgctgc

SEQ ID NO: 8753 - RNA, 22 nt, synthetic construct
  source 1..22: mol_type = other RNA
cttggccagcgccgacttagtg

SEQ ID NO: 8754 - RNA, 22 nt, synthetic construct
  source 1..22: mol_type = other RNA
gaaaccaggcgtttcaggctct

SEQ ID NO: 8755 - RNA, 22 nt, synthetic construct
  source 1..22: mol_type = other RNA
gaaaccgatctgctgcagccac

SEQ ID NO: 8756 - RNA, 22 nt, synthetic construct
  source 1..22: mol_type = other RNA
gaaacgcctggtttcctactct

SEQ ID NO: 8757 - RNA, 22 nt, synthetic construct
  source 1..22: mol_type = other RNA
gaacctcggcctccttccagct

SEQ ID NO: 8758 - RNA, 22 nt, synthetic construct
  source 1..22: mol_type = other RNA
gaagctctcgcagtacttggag

SEQ ID NO: 8759 - RNA, 22 nt, synthetic construct
  source 1..22: mol_type = other RNA
gaaggaggccgaggttcagacg

SEQ ID NO: 8760 - RNA, 22 nt, synthetic construct
  source 1..22: mol_type = other RNA
gacatcggcgccatccagagcc

SEQ ID NO: 8761 - RNA, 22 nt, synthetic construct
  source 1..22: mol_type = other RNA
gacgtggctgcagcagatcggt

SEQ ID NO: 8762 - RNA, 22 nt, synthetic construct
  source 1..22: mol_type = other RNA
gactctacccggaagctctcgc

SEQ ID NO: 8763 - RNA, 22 nt, synthetic construct
  source 1..22: mol_type = other RNA
gacttagtgccattggtagagt

SEQ ID NO: 8764 - RNA, 22 nt, synthetic construct
  source 1..22: mol_type = other RNA
gagaaaccgatctgctgcagcc

SEQ ID NO: 8765 - RNA, 22 nt, synthetic construct
  source 1..22: mol_type = other RNA
gagagcttccgggtagagtcgc

SEQ ID NO: 8766 - RNA, 22 nt, synthetic construct
  source 1..22: mol_type = other RNA
gagcctgaaacgcctggtttcc

SEQ ID NO: 8767 - RNA, 22 nt, synthetic construct
  source 1..22: mol_type = other RNA
gagcttccgggtagagtcgcgt

SEQ ID NO: 8768 - RNA, 22 nt, synthetic construct
  source 1..22: mol_type = other RNA
gaggaggtgccacggcccatcc

SEQ ID NO: 8769 - RNA, 22 nt, synthetic construct
  source 1..22: mol_type = other RNA
gaggccgaggttcagacgtggc

SEQ ID NO: 8770 - RNA, 22 nt, synthetic construct
  source 1..22: mol_type = other RNA
gaggcgtatcccacgcgactct

SEQ ID NO: 8771 - RNA, 22 nt, synthetic construct
  source 1..22: mol_type = other RNA
gagggcaggatgggccgtggca

SEQ ID NO: 8772 - RNA, 22 nt, synthetic construct
  source 1..22: mol_type = other RNA
gaggtgccacggcccatcctgc

SEQ ID NO: 8773 - RNA, 22 nt, synthetic construct
  source 1..22: mol_type = other RNA
gaggttcagacgtggctgcagc

SEQ ID NO: 8774 - RNA, 22 nt, synthetic construct
  source 1..22: mol_type = other RNA
gagtaggaaaccaggcgtttca

SEQ ID NO: 8775 - RNA, 22 nt, synthetic construct
  source 1..22: mol_type = other RNA
gatcggtttctccaagtactgc

SEQ ID NO: 8776 - RNA, 22 nt, synthetic construct
  source 1..22: mol_type = other RNA
gatctgctgcagccacgtctga

SEQ ID NO: 8777 - RNA, 22 nt, synthetic construct
  source 1..22: mol_type = other RNA
gatgggccgtggcacctcctcg

SEQ ID NO: 8778 - RNA, 22 nt, synthetic construct
  source 1..22: mol_type = other RNA
gcacctcctcgcccagcaggcg

SEQ ID NO: 8779 - RNA, 22 nt, synthetic construct
  source 1..22: mol_type = other RNA
gcacggagggcaggatgggccg

SEQ ID NO: 8780 - RNA, 22 nt, synthetic construct
  source 1..22: mol_type = other RNA
gcactaagtcggcgctggccaa

SEQ ID NO: 8781 - RNA, 22 nt, synthetic construct
  source 1..22: mol_type = other RNA
gcagatcggtttctccaagtac

SEQ ID NO: 8782 - RNA, 22 nt, synthetic construct
  source 1..22: mol_type = other RNA
gcagcagatcggtttctccaag

SEQ ID NO: 8783 - RNA, 22 nt, synthetic construct
  source 1..22: mol_type = other RNA
gcagccacgtctgaacctcggc

SEQ ID NO: 8784 - RNA, 22 nt, synthetic construct
  source 1..22: mol_type = other RNA
gcagcgcgcgcttggccagcgc

SEQ ID NO: 8785 - RNA, 22 nt, synthetic construct
  source 1..22: mol_type = other RNA
gcaggatgggccgtggcacctc

SEQ ID NO: 8786 - RNA, 22 nt, synthetic construct
  source 1..22: mol_type = other RNA
gcaggcgcagcgcgcgcttggc

SEQ ID NO: 8787 - RNA, 22 nt, synthetic construct
  source 1..22: mol_type = other RNA
gcagtacttggagaaaccgatc

SEQ ID NO: 8788 - RNA, 22 nt, synthetic construct
  source 1..22: mol_type = other RNA
gccaagcgcgcgctgcgcctgc

SEQ ID NO: 8789 - RNA, 22 nt, synthetic construct
  source 1..22: mol_type = other RNA
gccacggcccatcctgccctcc

SEQ ID NO: 8790 - RNA, 22 nt, synthetic construct
  source 1..22: mol_type = other RNA
gccacgtctgaacctcggcctc

SEQ ID NO: 8791 - RNA, 22 nt, synthetic construct
  source 1..22: mol_type = other RNA
gccagcgccgacttagtgccat

SEQ ID NO: 8792 - RNA, 22 nt, synthetic construct
  source 1..22: mol_type = other RNA
gccatccagagcctgaaacgcc

SEQ ID NO: 8793 - RNA, 22 nt, synthetic construct
  source 1..22: mol_type = other RNA
gccattggtagagtaggaaacc

SEQ ID NO: 8794 - RNA, 22 nt, synthetic construct
  source 1..22: mol_type = other RNA
gcccagcaggcgcagcgcgcgc

SEQ ID NO: 8795 - RNA, 22 nt, synthetic construct
  source 1..22: mol_type = other RNA
gcccagctggaaggaggccgag

SEQ ID NO: 8796 - RNA, 22 nt, synthetic construct
  source 1..22: mol_type = other RNA
gcccatcctgccctccgtgccc

SEQ ID NO: 8797 - RNA, 22 nt, synthetic construct
  source 1..22: mol_type = other RNA
gccctccgtgcccagctggaag

SEQ ID NO: 8798 - RNA, 22 nt, synthetic construct
  source 1..22: mol_type = other RNA
gccgacttagtgccattggtag

SEQ ID NO: 8799 - RNA, 22 nt, synthetic construct
  source 1..22: mol_type = other RNA
gccgaggttcagacgtggctgc

SEQ ID NO: 8800 - RNA, 22 nt, synthetic construct
  source 1..22: mol_type = other RNA
gccgtggcacctcctcgcccag

SEQ ID NO: 8801 - RNA, 22 nt, synthetic construct
  source 1..22: mol_type = other RNA
gcctccttccagctgggcacgg

SEQ ID NO: 8802 - RNA, 22 nt, synthetic construct
  source 1..22: mol_type = other RNA
gcctgaaacgcctggtttccta

SEQ ID NO: 8803 - RNA, 22 nt, synthetic construct
  source 1..22: mol_type = other RNA
gcctgctgggcgaggaggtgcc

SEQ ID NO: 8804 - RNA, 22 nt, synthetic construct
  source 1..22: mol_type = other RNA
gcctggtttcctactctaccaa

SEQ ID NO: 8805 - RNA, 22 nt, synthetic construct
  source 1..22: mol_type = other RNA
gcgacatcggcgccatccagag

SEQ ID NO: 8806 - RNA, 22 nt, synthetic construct
  source 1..22: mol_type = other RNA
gcgactctacccggaagctctc

SEQ ID NO: 8807 - RNA, 22 nt, synthetic construct
  source 1..22: mol_type = other RNA
gcgagagcttccgggtagagtc

SEQ ID NO: 8808 - RNA, 22 nt, synthetic construct
  source 1..22: mol_type = other RNA
gcgaggaggtgccacggcccat

SEQ ID NO: 8809 - RNA, 22 nt, synthetic construct
  source 1..22: mol_type = other RNA
gcgcagcgcgcgcttggccagc

SEQ ID NO: 8810 - RNA, 22 nt, synthetic construct
  source 1..22: mol_type = other RNA
gcgccatccagagcctgaaacg

SEQ ID NO: 8811 - RNA, 22 nt, synthetic construct
  source 1..22: mol_type = other RNA
gcgccgacttagtgccattggt

SEQ ID NO: 8812 - RNA, 22 nt, synthetic construct
  source 1..22: mol_type = other RNA
gcgcctgctgggcgaggaggtg

SEQ ID NO: 8813 - RNA, 22 nt, synthetic construct
  source 1..22: mol_type = other RNA
gcgcgcgctgcgcctgctgggc

SEQ ID NO: 8814 - RNA, 22 nt, synthetic construct
  source 1..22: mol_type = other RNA
gcgcgcgcttggccagcgccga

SEQ ID NO: 8815 - RNA, 22 nt, synthetic construct
  source 1..22: mol_type = other RNA
gcgcgctgcgcctgctgggcga

SEQ ID NO: 8816 - RNA, 22 nt, synthetic construct
  source 1..22: mol_type = other RNA
gcgcgcttggccagcgccgact

SEQ ID NO: 8817 - RNA, 22 nt, synthetic construct
  source 1..22: mol_type = other RNA
gcgctgcgcctgctgggcgagg

SEQ ID NO: 8818 - RNA, 22 nt, synthetic construct
  source 1..22: mol_type = other RNA
gcgctggccaagcgcgcgctgc

SEQ ID NO: 8819 - RNA, 22 nt, synthetic construct
  source 1..22: mol_type = other RNA
gcgcttggccagcgccgactta

SEQ ID NO: 8820 - RNA, 22 nt, synthetic construct
  source 1..22: mol_type = other RNA
gcgtatcccacgcgactctacc

SEQ ID NO: 8821 - RNA, 22 nt, synthetic construct
  source 1..22: mol_type = other RNA
gcgtttcaggctctggatggcg

SEQ ID NO: 8822 - RNA, 22 nt, synthetic construct
  source 1..22: mol_type = other RNA
gctctcgcagtacttggagaaa

SEQ ID NO: 8823 - RNA, 22 nt, synthetic construct
  source 1..22: mol_type = other RNA
gctctggatggcgccgatgtcg

SEQ ID NO: 8824 - RNA, 22 nt, synthetic construct
  source 1..22: mol_type = other RNA
gctgcagcagatcggtttctcc

SEQ ID NO: 8825 - RNA, 22 nt, synthetic construct
  source 1..22: mol_type = other RNA
gctgcagccacgtctgaacctc

SEQ ID NO: 8826 - RNA, 22 nt, synthetic construct
  source 1..22: mol_type = other RNA
gctgcgcctgctgggcgaggag

SEQ ID NO: 8827 - RNA, 22 nt, synthetic construct
  source 1..22: mol_type = other RNA
gctggaaggaggccgaggttca

SEQ ID NO: 8828 - RNA, 22 nt, synthetic construct
  source 1..22: mol_type = other RNA
gctggccaagcgcgcgctgcgc

SEQ ID NO: 8829 - RNA, 22 nt, synthetic construct
  source 1..22: mol_type = other RNA
gctgggcacggagggcaggatg

SEQ ID NO: 8830 - RNA, 22 nt, synthetic construct
  source 1..22: mol_type = other RNA
gctgggcgaggaggtgccacgg

SEQ ID NO: 8831 - RNA, 22 nt, synthetic construct
  source 1..22: mol_type = other RNA
gcttccgggtagagtcgcgtgg

SEQ ID NO: 8832 - RNA, 22 nt, synthetic construct
  source 1..22: mol_type = other RNA
gcttggccagcgccgacttagt

SEQ ID NO: 8833 - RNA, 22 nt, synthetic construct
  source 1..22: mol_type = other RNA
ggaaaccaggcgtttcaggctc

SEQ ID NO: 8834 - RNA, 22 nt, synthetic construct
  source 1..22: mol_type = other RNA
ggaagctctcgcagtacttgga

SEQ ID NO: 8835 - RNA, 22 nt, synthetic construct
  source 1..22: mol_type = other RNA
ggaaggaggccgaggttcagac

SEQ ID NO: 8836 - RNA, 22 nt, synthetic construct
  source 1..22: mol_type = other RNA
ggagaaaccgatctgctgcagc

SEQ ID NO: 8837 - RNA, 22 nt, synthetic construct
  source 1..22: mol_type = other RNA
ggaggccgaggttcagacgtgg

SEQ ID NO: 8838 - RNA, 22 nt, synthetic construct
  source 1..22: mol_type = other RNA
ggaggcgtatcccacgcgactc

SEQ ID NO: 8839 - RNA, 22 nt, synthetic construct
  source 1..22: mol_type = other RNA
ggagggcaggatgggccgtggc

SEQ ID NO: 8840 - RNA, 22 nt, synthetic construct
  source 1..22: mol_type = other RNA
ggaggtgccacggcccatcctg

SEQ ID NO: 8841 - RNA, 22 nt, synthetic construct
  source 1..22: mol_type = other RNA
ggatgggccgtggcacctcctc

SEQ ID NO: 8842 - RNA, 22 nt, synthetic construct
  source 1..22: mol_type = other RNA
ggcacctcctcgcccagcaggc

SEQ ID NO: 8843 - RNA, 22 nt, synthetic construct
  source 1..22: mol_type = other RNA
ggcacggagggcaggatgggcc

SEQ ID NO: 8844 - RNA, 22 nt, synthetic construct
  source 1..22: mol_type = other RNA
ggcactaagtcggcgctggcca

SEQ ID NO: 8845 - RNA, 22 nt, synthetic construct
  source 1..22: mol_type = other RNA
ggcaggatgggccgtggcacct

SEQ ID NO: 8846 - RNA, 22 nt, synthetic construct
  source 1..22: mol_type = other RNA
ggccaagcgcgcgctgcgcctg

SEQ ID NO: 8847 - RNA, 22 nt, synthetic construct
  source 1..22: mol_type = other RNA
ggccagcgccgacttagtgcca

SEQ ID NO: 8848 - RNA, 22 nt, synthetic construct
  source 1..22: mol_type = other RNA
ggcccatcctgccctccgtgcc

SEQ ID NO: 8849 - RNA, 22 nt, synthetic construct
  source 1..22: mol_type = other RNA
ggccgaggttcagacgtggctg

SEQ ID NO: 8850 - RNA, 22 nt, synthetic construct
  source 1..22: mol_type = other RNA
ggccgtggcacctcctcgccca

SEQ ID NO: 8851 - RNA, 22 nt, synthetic construct
  source 1..22: mol_type = other RNA
ggcctccttccagctgggcacg

SEQ ID NO: 8852 - RNA, 22 nt, synthetic construct
  source 1..22: mol_type = other RNA
ggcgaggaggtgccacggccca

SEQ ID NO: 8853 - RNA, 22 nt, synthetic construct
  source 1..22: mol_type = other RNA
ggcgcagcgcgcgcttggccag

SEQ ID NO: 8854 - RNA, 22 nt, synthetic construct
  source 1..22: mol_type = other RNA
ggcgccatccagagcctgaaac

SEQ ID NO: 8855 - RNA, 22 nt, synthetic construct
  source 1..22: mol_type = other RNA
ggcgctggccaagcgcgcgctg

SEQ ID NO: 8856 - RNA, 22 nt, synthetic construct
  source 1..22: mol_type = other RNA
ggcgtatcccacgcgactctac

SEQ ID NO: 8857 - RNA, 22 nt, synthetic construct
  source 1..22: mol_type = other RNA
ggcgtttcaggctctggatggc

SEQ ID NO: 8858 - RNA, 22 nt, synthetic construct
  source 1..22: mol_type = other RNA
ggctctggatggcgccgatgtc

SEQ ID NO: 8859 - RNA, 22 nt, synthetic construct
  source 1..22: mol_type = other RNA
ggctgcagcagatcggtttctc

SEQ ID NO: 8860 - RNA, 22 nt, synthetic construct
  source 1..22: mol_type = other RNA
gggaggcgtatcccacgcgact

SEQ ID NO: 8861 - RNA, 22 nt, synthetic construct
  source 1..22: mol_type = other RNA
gggcacggagggcaggatgggc

SEQ ID NO: 8862 - RNA, 22 nt, synthetic construct
  source 1..22: mol_type = other RNA
gggcaggatgggccgtggcacc

SEQ ID NO: 8863 - RNA, 22 nt, synthetic construct
  source 1..22: mol_type = other RNA
gggccgtggcacctcctcgccc

SEQ ID NO: 8864 - RNA, 22 nt, synthetic construct
  source 1..22: mol_type = other RNA
gggcgaggaggtgccacggccc

SEQ ID NO: 8865 - RNA, 22 nt, synthetic construct
  source 1..22: mol_type = other RNA
ggggaggcgtatcccacgcgac

SEQ ID NO: 8866 - RNA, 22 nt, synthetic construct
  source 1..22: mol_type = other RNA
gggggaggcgtatcccacgcga

SEQ ID NO: 8867 - RNA, 22 nt, synthetic construct
  source 1..22: mol_type = other RNA
gggtagagtcgcgtgggatacg

SEQ ID NO: 8868 - RNA, 22 nt, synthetic construct
  source 1..22: mol_type = other RNA
ggtagagtaggaaaccaggcgt

SEQ ID NO: 8869 - RNA, 22 nt, synthetic construct
  source 1..22: mol_type = other RNA
ggtagagtcgcgtgggatacgc

SEQ ID NO: 8870 - RNA, 22 nt, synthetic construct
  source 1..22: mol_type = other RNA
ggtgccacggcccatcctgccc

SEQ ID NO: 8871 - RNA, 22 nt, synthetic construct
  source 1..22: mol_type = other RNA
ggttcagacgtggctgcagcag

SEQ ID NO: 8872 - RNA, 22 nt, synthetic construct
  source 1..22: mol_type = other RNA
ggtttcctactctaccaatggc

SEQ ID NO: 8873 - RNA, 22 nt, synthetic construct
  source 1..22: mol_type = other RNA
ggtttctccaagtactgcgaga

SEQ ID NO: 8874 - RNA, 22 nt, synthetic construct
  source 1..22: mol_type = other RNA
gtactgcgagagcttccgggta

SEQ ID NO: 8875 - RNA, 22 nt, synthetic construct
  source 1..22: mol_type = other RNA
gtacttggagaaaccgatctgc

SEQ ID NO: 8876 - RNA, 22 nt, synthetic construct
  source 1..22: mol_type = other RNA
gtagagtaggaaaccaggcgtt

SEQ ID NO: 8877 - RNA, 22 nt, synthetic construct
  source 1..22: mol_type = other RNA
gtagagtcgcgtgggatacgcc

SEQ ID NO: 8878 - RNA, 22 nt, synthetic construct
  source 1..22: mol_type = other RNA
gtaggaaaccaggcgtttcagg

SEQ ID NO: 8879 - RNA, 22 nt, synthetic construct
  source 1..22: mol_type = other RNA
gtatcccacgcgactctacccg

SEQ ID NO: 8880 - RNA, 22 nt, synthetic construct
  source 1..22: mol_type = other RNA
gtcggcgctggccaagcgcgcg

SEQ ID NO: 8881 - RNA, 22 nt, synthetic construct
  source 1..22: mol_type = other RNA
gtctgaacctcggcctccttcc

SEQ ID NO: 8882 - RNA, 22 nt, synthetic construct
  source 1..22: mol_type = other RNA
gtgccacggcccatcctgccct

SEQ ID NO: 8883 - RNA, 22 nt, synthetic construct
  source 1..22: mol_type = other RNA
gtgccattggtagagtaggaaa

SEQ ID NO: 8884 - RNA, 22 nt, synthetic construct
  source 1..22: mol_type = other RNA
gtgcccagctggaaggaggccg

SEQ ID NO: 8885 - RNA, 22 nt, synthetic construct
  source 1..22: mol_type = other RNA
gtggcacctcctcgcccagcag

SEQ ID NO: 8886 - RNA, 22 nt, synthetic construct
  source 1..22: mol_type = other RNA
gtggctgcagcagatcggtttc

SEQ ID NO: 8887 - RNA, 22 nt, synthetic construct
  source 1..22: mol_type = other RNA
gtgttcagcgacatcggcgcca

SEQ ID NO: 8888 - RNA, 22 nt, synthetic construct
  source 1..22: mol_type = other RNA
gttcagacgtggctgcagcaga

SEQ ID NO: 8889 - RNA, 22 nt, synthetic construct
  source 1..22: mol_type = other RNA
gttcagcgacatcggcgccatc

SEQ ID NO: 8890 - RNA, 22 nt, synthetic construct
  source 1..22: mol_type = other RNA
gtttcaggctctggatggcgcc

SEQ ID NO: 8891 - RNA, 22 nt, synthetic construct
  source 1..22: mol_type = other RNA
gtttcctactctaccaatggca

SEQ ID NO: 8892 - RNA, 22 nt, synthetic construct
  source 1..22: mol_type = other RNA
gtttctccaagtactgcgagag

SEQ ID NO: 8893 - RNA, 22 nt, synthetic construct
  source 1..22: mol_type = other RNA
taagtcggcgctggccaagcgc

SEQ ID NO: 8894 - RNA, 22 nt, synthetic construct
  source 1..22: mol_type = other RNA
taccaatggcactaagtcggcg

SEQ ID NO: 8895 - RNA, 22 nt, synthetic construct
  source 1..22: mol_type = other RNA
tacccggaagctctcgcagtac

SEQ ID NO: 8896 - RNA, 22 nt, synthetic construct
  source 1..22: mol_type = other RNA
tactctaccaatggcactaagt

SEQ ID NO: 8897 - RNA, 22 nt, synthetic construct
  source 1..22: mol_type = other RNA
tactgcgagagcttccgggtag

SEQ ID NO: 8898 - RNA, 22 nt, synthetic construct
  source 1..22: mol_type = other RNA
tacttggagaaaccgatctgct

SEQ ID NO: 8899 - RNA, 22 nt, synthetic construct
  source 1..22: mol_type = other RNA
tagagtaggaaaccaggcgttt

SEQ ID NO: 8900 - RNA, 22 nt, synthetic construct
  source 1..22: mol_type = other RNA
taggaaaccaggcgtttcaggc

SEQ ID NO: 8901 - RNA, 22 nt, synthetic construct
  source 1..22: mol_type = other RNA
tagtgccattggtagagtagga

SEQ ID NO: 8902 - RNA, 22 nt, synthetic construct
  source 1..22: mol_type = other RNA
tatcccacgcgactctacccgg

SEQ ID NO: 8903 - RNA, 22 nt, synthetic construct
  source 1..22: mol_type = other RNA
tcagacgtggctgcagcagatc

SEQ ID NO: 8904 - RNA, 22 nt, synthetic construct
  source 1..22: mol_type = other RNA
tcagcgacatcggcgccatcca

SEQ ID NO: 8905 - RNA, 22 nt, synthetic construct
  source 1..22: mol_type = other RNA
tcaggctctggatggcgccgat

SEQ ID NO: 8906 - RNA, 22 nt, synthetic construct
  source 1..22: mol_type = other RNA
tccaagtactgcgagagcttcc

SEQ ID NO: 8907 - RNA, 22 nt, synthetic construct
  source 1..22: mol_type = other RNA
tccagagcctgaaacgcctggt

SEQ ID NO: 8908 - RNA, 22 nt, synthetic construct
  source 1..22: mol_type = other RNA
tccagctgggcacggagggcag

SEQ ID NO: 8909 - RNA, 22 nt, synthetic construct
  source 1..22: mol_type = other RNA
tcccacgcgactctacccggaa

SEQ ID NO: 8910 - RNA, 22 nt, synthetic construct
  source 1..22: mol_type = other RNA
tccgggtagagtcgcgtgggat

SEQ ID NO: 8911 - RNA, 22 nt, synthetic construct
  source 1..22: mol_type = other RNA
tccgtgcccagctggaaggagg

SEQ ID NO: 8912 - RNA, 22 nt, synthetic construct
  source 1..22: mol_type = other RNA
tcctactctaccaatggcacta

SEQ ID NO: 8913 - RNA, 22 nt, synthetic construct
  source 1..22: mol_type = other RNA
tcctcgcccagcaggcgcagcg

SEQ ID NO: 8914 - RNA, 22 nt, synthetic construct
  source 1..22: mol_type = other RNA
tcctgccctccgtgcccagctg

SEQ ID NO: 8915 - RNA, 22 nt, synthetic construct
  source 1..22: mol_type = other RNA
tccttccagctgggcacggagg

SEQ ID NO: 8916 - RNA, 22 nt, synthetic construct
  source 1..22: mol_type = other RNA
tcgcagtacttggagaaaccga

SEQ ID NO: 8917 - RNA, 22 nt, synthetic construct
  source 1..22: mol_type = other RNA
tcgcccagcaggcgcagcgcgc

SEQ ID NO: 8918 - RNA, 22 nt, synthetic construct
  source 1..22: mol_type = other RNA
tcggcctccttccagctgggca

SEQ ID NO: 8919 - RNA, 22 nt, synthetic construct
  source 1..22: mol_type = other RNA
tcggcgccatccagagcctgaa

SEQ ID NO: 8920 - RNA, 22 nt, synthetic construct
  source 1..22: mol_type = other RNA
tcggcgctggccaagcgcgcgc

SEQ ID NO: 8921 - RNA, 22 nt, synthetic construct
  source 1..22: mol_type = other RNA
tcgggggaggcgtatcccacgc

SEQ ID NO: 8922 - RNA, 22 nt, synthetic construct
  source 1..22: mol_type = other RNA
tcggtttctccaagtactgcga

SEQ ID NO: 8923 - RNA, 22 nt, synthetic construct
  source 1..22: mol_type = other RNA
tctaccaatggcactaagtcgg

SEQ ID NO: 8924 - RNA, 22 nt, synthetic construct
  source 1..22: mol_type = other RNA
tctacccggaagctctcgcagt

SEQ ID NO: 8925 - RNA, 22 nt, synthetic construct
  source 1..22: mol_type = other RNA
tctccaagtactgcgagagctt

SEQ ID NO: 8926 - RNA, 22 nt, synthetic construct
  source 1..22: mol_type = other RNA
tctcgcagtacttggagaaacc

SEQ ID NO: 8927 - RNA, 22 nt, synthetic construct
  source 1..22: mol_type = other RNA
tctgaacctcggcctccttcca

SEQ ID NO: 8928 - RNA, 22 nt, synthetic construct
  source 1..22: mol_type = other RNA
tctgctgcagccacgtctgaac

SEQ ID NO: 8929 - RNA, 22 nt, synthetic construct
  source 1..22: mol_type = other RNA
tgaaacgcctggtttcctactc

SEQ ID NO: 8930 - RNA, 22 nt, synthetic construct
  source 1..22: mol_type = other RNA
tgaacctcggcctccttccagc

SEQ ID NO: 8931 - RNA, 22 nt, synthetic construct
  source 1..22: mol_type = other RNA
tgcagcagatcggtttctccaa

SEQ ID NO: 8932 - RNA, 22 nt, synthetic construct
  source 1..22: mol_type = other RNA
tgcagccacgtctgaacctcgg

SEQ ID NO: 8933 - RNA, 22 nt, synthetic construct
  source 1..22: mol_type = other RNA
tgccacggcccatcctgccctc

SEQ ID NO: 8934 - RNA, 22 nt, synthetic construct
  source 1..22: mol_type = other RNA
tgccattggtagagtaggaaac

SEQ ID NO: 8935 - RNA, 22 nt, synthetic construct
  source 1..22: mol_type = other RNA
tgcccagctggaaggaggccga

SEQ ID NO: 8936 - RNA, 22 nt, synthetic construct
  source 1..22: mol_type = other RNA
tgccctccgtgcccagctggaa

SEQ ID NO: 8937 - RNA, 22 nt, synthetic construct
  source 1..22: mol_type = other RNA
tgcgagagcttccgggtagagt

SEQ ID NO: 8938 - RNA, 22 nt, synthetic construct
  source 1..22: mol_type = other RNA
tgcgcctgctgggcgaggaggt

SEQ ID NO: 8939 - RNA, 22 nt, synthetic construct
  source 1..22: mol_type = other RNA
tgctgcagccacgtctgaacct

SEQ ID NO: 8940 - RNA, 22 nt, synthetic construct
  source 1..22: mol_type = other RNA
tgctgggcgaggaggtgccacg

SEQ ID NO: 8941 - RNA, 22 nt, synthetic construct
  source 1..22: mol_type = other RNA
tggaaggaggccgaggttcaga

SEQ ID NO: 8942 - RNA, 22 nt, synthetic construct
  source 1..22: mol_type = other RNA
tggagaaaccgatctgctgcag

SEQ ID NO: 8943 - RNA, 22 nt, synthetic construct
  source 1..22: mol_type = other RNA
tggcacctcctcgcccagcagg

SEQ ID NO: 8944 - RNA, 22 nt, synthetic construct
  source 1..22: mol_type = other RNA
tggcactaagtcggcgctggcc

SEQ ID NO: 8945 - RNA, 22 nt, synthetic construct
  source 1..22: mol_type = other RNA
tggccaagcgcgcgctgcgcct

SEQ ID NO: 8946 - RNA, 22 nt, synthetic construct
  source 1..22: mol_type = other RNA
tggccagcgccgacttagtgcc

SEQ ID NO: 8947 - RNA, 22 nt, synthetic construct
  source 1..22: mol_type = other RNA
tggctgcagcagatcggtttct

SEQ ID NO: 8948 - RNA, 22 nt, synthetic construct
  source 1..22: mol_type = other RNA
tgggcacggagggcaggatggg

SEQ ID NO: 8949 - RNA, 22 nt, synthetic construct
  source 1..22: mol_type = other RNA
tgggccgtggcacctcctcgcc

SEQ ID NO: 8950 - RNA, 22 nt, synthetic construct
  source 1..22: mol_type = other RNA
tgggcgaggaggtgccacggcc

SEQ ID NO: 8951 - RNA, 22 nt, synthetic construct
  source 1..22: mol_type = other RNA
tggtagagtaggaaaccaggcg

SEQ ID NO: 8952 - RNA, 22 nt, synthetic construct
  source 1..22: mol_type = other RNA
tggtttcctactctaccaatgg

SEQ ID NO: 8953 - RNA, 22 nt, synthetic construct
  source 1..22: mol_type = other RNA
tgttcagcgacatcggcgccat

SEQ ID NO: 8954 - RNA, 22 nt, synthetic construct
  source 1..22: mol_type = other RNA
ttagtgccattggtagagtagg

SEQ ID NO: 8955 - RNA, 22 nt, synthetic construct
  source 1..22: mol_type = other RNA
ttcagacgtggctgcagcagat

SEQ ID NO: 8956 - RNA, 22 nt, synthetic construct
  source 1..22: mol_type = other RNA
ttcagcgacatcggcgccatcc

SEQ ID NO: 8957 - RNA, 22 nt, synthetic construct
  source 1..22: mol_type = other RNA
ttcaggctctggatggcgccga

SEQ ID NO: 8958 - RNA, 22 nt, synthetic construct
  source 1..22: mol_type = other RNA
ttccagctgggcacggagggca

SEQ ID NO: 8959 - RNA, 22 nt, synthetic construct
  source 1..22: mol_type = other RNA
ttccgggtagagtcgcgtggga

SEQ ID NO: 8960 - RNA, 22 nt, synthetic construct
  source 1..22: mol_type = other RNA
ttcctactctaccaatggcact

SEQ ID NO: 8961 - RNA, 22 nt, synthetic construct
  source 1..22: mol_type = other RNA
ttctccaagtactgcgagagct

SEQ ID NO: 8962 - RNA, 22 nt, synthetic construct
  source 1..22: mol_type = other RNA
ttggagaaaccgatctgctgca

SEQ ID NO: 8963 - RNA, 22 nt, synthetic construct
  source 1..22: mol_type = other RNA
ttggccagcgccgacttagtgc

SEQ ID NO: 8964 - RNA, 22 nt, synthetic construct
  source 1..22: mol_type = other RNA
ttggtagagtaggaaaccaggc

SEQ ID NO: 8965 - RNA, 22 nt, synthetic construct
  source 1..22: mol_type = other RNA
tttcaggctctggatggcgccg

SEQ ID NO: 8966 - RNA, 22 nt, synthetic construct
  source 1..22: mol_type = other RNA
tttcctactctaccaatggcac

SEQ ID NO: 8967 - RNA, 22 nt, synthetic construct
  source 1..22: mol_type = other RNA
tttctccaagtactgcgagagc

SEQ ID NO: 8968 - RNA, 20 nt, synthetic construct
  source 1..20: mol_type = other RNA
aaatcgggcatcacccgcaa

SEQ ID NO: 8969 - RNA, 20 nt, synthetic construct
  source 1..20: mol_type = other RNA
aactccagaccgacctgggc

SEQ ID NO: 8970 - RNA, 20 nt, synthetic construct
  source 1..20: mol_type = other RNA
aagaggtacggagcctcctg

SEQ ID NO: 8971 - RNA, 20 nt, synthetic construct
  source 1..20: mol_type = other RNA
aatcgggcatcacccgcaag

SEQ ID NO: 8972 - RNA, 20 nt, synthetic construct
  source 1..20: mol_type = other RNA
acccgcaagaggtacggagc

SEQ ID NO: 8973 - RNA, 20 nt, synthetic construct
  source 1..20: mol_type = other RNA
accgacctgggcatgaaatc

SEQ ID NO: 8974 - RNA, 20 nt, synthetic construct
  source 1..20: mol_type = other RNA
acctcttgcgggtgatgccc

SEQ ID NO: 8975 - RNA, 20 nt, synthetic construct
  source 1..20: mol_type = other RNA
acctgcttctgcggctcacg

SEQ ID NO: 8976 - RNA, 20 nt, synthetic construct
  source 1..20: mol_type = other RNA
acctgggcatgaaatcgggc

SEQ ID NO: 8977 - RNA, 20 nt, synthetic construct
  source 1..20: mol_type = other RNA
acggaggaggaactccagac

SEQ ID NO: 8978 - RNA, 20 nt, synthetic construct
  source 1..20: mol_type = other RNA
actccagaccgacctgggca

SEQ ID NO: 8979 - RNA, 20 nt, synthetic construct
  source 1..20: mol_type = other RNA
agaagcaggtcgccatccac

SEQ ID NO: 8980 - RNA, 20 nt, synthetic construct
  source 1..20: mol_type = other RNA
agaccgacctgggcatgaaa

SEQ ID NO: 8981 - RNA, 20 nt, synthetic construct
  source 1..20: mol_type = other RNA
agaggtacggagcctcctgc

SEQ ID NO: 8982 - RNA, 20 nt, synthetic construct
  source 1..20: mol_type = other RNA
agcagcaggtggatggcgac

SEQ ID NO: 8983 - RNA, 20 nt, synthetic construct
  source 1..20: mol_type = other RNA
agcaggtggatggcgacctg

SEQ ID NO: 8984 - RNA, 20 nt, synthetic construct
  source 1..20: mol_type = other RNA
agccgcagaagcaggtcgcc

SEQ ID NO: 8985 - RNA, 20 nt, synthetic construct
  source 1..20: mol_type = other RNA
aggaactccagaccgacctg

SEQ ID NO: 8986 - RNA, 20 nt, synthetic construct
  source 1..20: mol_type = other RNA
aggaggaactccagaccgac

SEQ ID NO: 8987 - RNA, 20 nt, synthetic construct
  source 1..20: mol_type = other RNA
aggaggctccgtacctcttg

SEQ ID NO: 8988 - RNA, 20 nt, synthetic construct
  source 1..20: mol_type = other RNA
aggctccgtacctcttgcgg

SEQ ID NO: 8989 - RNA, 20 nt, synthetic construct
  source 1..20: mol_type = other RNA
aggtacggagcctcctgccc

SEQ ID NO: 8990 - RNA, 20 nt, synthetic construct
  source 1..20: mol_type = other RNA
aggtcggtctggagttcctc

SEQ ID NO: 8991 - RNA, 20 nt, synthetic construct
  source 1..20: mol_type = other RNA
aggtggatggcgacctgctt

SEQ ID NO: 8992 - RNA, 20 nt, synthetic construct
  source 1..20: mol_type = other RNA
agttcctcctccgtgagccg

SEQ ID NO: 8993 - RNA, 20 nt, synthetic construct
  source 1..20: mol_type = other RNA
atcacccgcaagaggtacgg

SEQ ID NO: 8994 - RNA, 20 nt, synthetic construct
  source 1..20: mol_type = other RNA
atcgggcatcacccgcaaga

SEQ ID NO: 8995 - RNA, 20 nt, synthetic construct
  source 1..20: mol_type = other RNA
atgaaatcgggcatcacccg

SEQ ID NO: 8996 - RNA, 20 nt, synthetic construct
  source 1..20: mol_type = other RNA
atgcccaggtcggtctggag

SEQ ID NO: 8997 - RNA, 20 nt, synthetic construct
  source 1..20: mol_type = other RNA
atgcccgatttcatgcccag

SEQ ID NO: 8998 - RNA, 20 nt, synthetic construct
  source 1..20: mol_type = other RNA
atggcgacctgcttctgcgg

SEQ ID NO: 8999 - RNA, 20 nt, synthetic construct
  source 1..20: mol_type = other RNA
atttcatgcccaggtcggtc

SEQ ID NO: 9000 - RNA, 20 nt, synthetic construct
  source 1..20: mol_type = other RNA
caagaggtacggagcctcct

SEQ ID NO: 9001 - RNA, 20 nt, synthetic construct
  source 1..20: mol_type = other RNA
cacccgcaagaggtacggag

SEQ ID NO: 9002 - RNA, 20 nt, synthetic construct
  source 1..20: mol_type = other RNA
cacggaggaggaactccaga

SEQ ID NO: 9003 - RNA, 20 nt, synthetic construct
  source 1..20: mol_type = other RNA
cagaagcaggtcgccatcca

SEQ ID NO: 9004 - RNA, 20 nt, synthetic construct
  source 1..20: mol_type = other RNA
cagaccgacctgggcatgaa

SEQ ID NO: 9005 - RNA, 20 nt, synthetic construct
  source 1..20: mol_type = other RNA
cagcaggtggatggcgacct

SEQ ID NO: 9006 - RNA, 20 nt, synthetic construct
  source 1..20: mol_type = other RNA
caggaggctccgtacctctt

SEQ ID NO: 9007 - RNA, 20 nt, synthetic construct
  source 1..20: mol_type = other RNA
caggtcggtctggagttcct

SEQ ID NO: 9008 - RNA, 20 nt, synthetic construct
  source 1..20: mol_type = other RNA
caggtggatggcgacctgct

SEQ ID NO: 9009 - RNA, 20 nt, synthetic construct
  source 1..20: mol_type = other RNA
catcacccgcaagaggtacg

SEQ ID NO: 9010 - RNA, 20 nt, synthetic construct
  source 1..20: mol_type = other RNA
catgaaatcgggcatcaccc

SEQ ID NO: 9011 - RNA, 20 nt, synthetic construct
  source 1..20: mol_type = other RNA
catgcccaggtcggtctgga

SEQ ID NO: 9012 - RNA, 20 nt, synthetic construct
  source 1..20: mol_type = other RNA
ccagaccgacctgggcatga

SEQ ID NO: 9013 - RNA, 20 nt, synthetic construct
  source 1..20: mol_type = other RNA
ccaggtcggtctggagttcc

SEQ ID NO: 9014 - RNA, 20 nt, synthetic construct
  source 1..20: mol_type = other RNA
cccaggtcggtctggagttc

SEQ ID NO: 9015 - RNA, 20 nt, synthetic construct
  source 1..20: mol_type = other RNA
cccgatttcatgcccaggtc

SEQ ID NO: 9016 - RNA, 20 nt, synthetic construct
  source 1..20: mol_type = other RNA
cccgcaagaggtacggagcc

SEQ ID NO: 9017 - RNA, 20 nt, synthetic construct
  source 1..20: mol_type = other RNA
ccgacctgggcatgaaatcg

SEQ ID NO: 9018 - RNA, 20 nt, synthetic construct
  source 1..20: mol_type = other RNA
ccgatttcatgcccaggtcg

SEQ ID NO: 9019 - RNA, 20 nt, synthetic construct
  source 1..20: mol_type = other RNA
ccgcaagaggtacggagcct

SEQ ID NO: 9020 - RNA, 20 nt, synthetic construct
  source 1..20: mol_type = other RNA
ccgcagaagcaggtcgccat

SEQ ID NO: 9021 - RNA, 20 nt, synthetic construct
  source 1..20: mol_type = other RNA
ccggcgggcaggaggctccg

SEQ ID NO: 9022 - RNA, 20 nt, synthetic construct
  source 1..20: mol_type = other RNA
ccgtacctcttgcgggtgat

SEQ ID NO: 9023 - RNA, 20 nt, synthetic construct
  source 1..20: mol_type = other RNA
ccgtgagccgcagaagcagg

SEQ ID NO: 9024 - RNA, 20 nt, synthetic construct
  source 1..20: mol_type = other RNA
cctccgtgagccgcagaagc

SEQ ID NO: 9025 - RNA, 20 nt, synthetic construct
  source 1..20: mol_type = other RNA
cctcctccgtgagccgcaga

SEQ ID NO: 9026 - RNA, 20 nt, synthetic construct
  source 1..20: mol_type = other RNA
cctcttgcgggtgatgcccg

SEQ ID NO: 9027 - RNA, 20 nt, synthetic construct
  source 1..20: mol_type = other RNA
cctgcttctgcggctcacgg

SEQ ID NO: 9028 - RNA, 20 nt, synthetic construct
  source 1..20: mol_type = other RNA
cctgggcatgaaatcgggca

SEQ ID NO: 9029 - RNA, 20 nt, synthetic construct
  source 1..20: mol_type = other RNA
cgacctgcttctgcggctca

SEQ ID NO: 9030 - RNA, 20 nt, synthetic construct
  source 1..20: mol_type = other RNA
cgacctgggcatgaaatcgg

SEQ ID NO: 9031 - RNA, 20 nt, synthetic construct
  source 1..20: mol_type = other RNA
cgatttcatgcccaggtcgg

SEQ ID NO: 9032 - RNA, 20 nt, synthetic construct
  source 1..20: mol_type = other RNA
cgcaagaggtacggagcctc

SEQ ID NO: 9033 - RNA, 20 nt, synthetic construct
  source 1..20: mol_type = other RNA
cgcagaagcaggtcgccatc

SEQ ID NO: 9034 - RNA, 20 nt, synthetic construct
  source 1..20: mol_type = other RNA
cggaggaggaactccagacc

SEQ ID NO: 9035 - RNA, 20 nt, synthetic construct
  source 1..20: mol_type = other RNA
cggcgggcaggaggctccgt

SEQ ID NO: 9036 - RNA, 20 nt, synthetic construct
  source 1..20: mol_type = other RNA
cggctcacggaggaggaact

SEQ ID NO: 9037 - RNA, 20 nt, synthetic construct
  source 1..20: mol_type = other RNA
cgggcaggaggctccgtacc

SEQ ID NO: 9038 - RNA, 20 nt, synthetic construct
  source 1..20: mol_type = other RNA
cgggcatcacccgcaagagg

SEQ ID NO: 9039 - RNA, 20 nt, synthetic construct
  source 1..20: mol_type = other RNA
cgggtgatgcccgatttcat

SEQ ID NO: 9040 - RNA, 20 nt, synthetic construct
  source 1..20: mol_type = other RNA
cggtctggagttcctcctcc

SEQ ID NO: 9041 - RNA, 20 nt, synthetic construct
  source 1..20: mol_type = other RNA
cgtacctcttgcgggtgatg

SEQ ID NO: 9042 - RNA, 20 nt, synthetic construct
  source 1..20: mol_type = other RNA
cgtgagccgcagaagcaggt

SEQ ID NO: 9043 - RNA, 20 nt, synthetic construct
  source 1..20: mol_type = other RNA
ctcacggaggaggaactcca

SEQ ID NO: 9044 - RNA, 20 nt, synthetic construct
  source 1..20: mol_type = other RNA
ctccagaccgacctgggcat

SEQ ID NO: 9045 - RNA, 20 nt, synthetic construct
  source 1..20: mol_type = other RNA
ctccgtacctcttgcgggtg

SEQ ID NO: 9046 - RNA, 20 nt, synthetic construct
  source 1..20: mol_type = other RNA
ctccgtgagccgcagaagca

SEQ ID NO: 9047 - RNA, 20 nt, synthetic construct
  source 1..20: mol_type = other RNA
ctcctccgtgagccgcagaa

SEQ ID NO: 9048 - RNA, 20 nt, synthetic construct
  source 1..20: mol_type = other RNA
ctcttgcgggtgatgcccga

SEQ ID NO: 9049 - RNA, 20 nt, synthetic construct
  source 1..20: mol_type = other RNA
ctgcggctcacggaggagga

SEQ ID NO: 9050 - RNA, 20 nt, synthetic construct
  source 1..20: mol_type = other RNA
ctgcttctgcggctcacgga

SEQ ID NO: 9051 - RNA, 20 nt, synthetic construct
  source 1..20: mol_type = other RNA
ctggagttcctcctccgtga

SEQ ID NO: 9052 - RNA, 20 nt, synthetic construct
  source 1..20: mol_type = other RNA
ctgggcatgaaatcgggcat

SEQ ID NO: 9053 - RNA, 20 nt, synthetic construct
  source 1..20: mol_type = other RNA
cttctgcggctcacggagga

SEQ ID NO: 9054 - RNA, 20 nt, synthetic construct
  source 1..20: mol_type = other RNA
cttgcgggtgatgcccgatt

SEQ ID NO: 9055 - RNA, 20 nt, synthetic construct
  source 1..20: mol_type = other RNA
gaaatcgggcatcacccgca

SEQ ID NO: 9056 - RNA, 20 nt, synthetic construct
  source 1..20: mol_type = other RNA
gaactccagaccgacctggg

SEQ ID NO: 9057 - RNA, 20 nt, synthetic construct
  source 1..20: mol_type = other RNA
gaagcaggtcgccatccacc

SEQ ID NO: 9058 - RNA, 20 nt, synthetic construct
  source 1..20: mol_type = other RNA
gaccgacctgggcatgaaat

SEQ ID NO: 9059 - RNA, 20 nt, synthetic construct
  source 1..20: mol_type = other RNA
gacctgcttctgcggctcac

SEQ ID NO: 9060 - RNA, 20 nt, synthetic construct
  source 1..20: mol_type = other RNA
gacctgggcatgaaatcggg

SEQ ID NO: 9061 - RNA, 20 nt, synthetic construct
  source 1..20: mol_type = other RNA
gagcagcaggtggatggcga

SEQ ID NO: 9062 - RNA, 20 nt, synthetic construct
  source 1..20: mol_type = other RNA
gagccgcagaagcaggtcgc

SEQ ID NO: 9063 - RNA, 20 nt, synthetic construct
  source 1..20: mol_type = other RNA
gaggaactccagaccgacct

SEQ ID NO: 9064 - RNA, 20 nt, synthetic construct
  source 1..20: mol_type = other RNA
gaggaggaactccagaccga

SEQ ID NO: 9065 - RNA, 20 nt, synthetic construct
  source 1..20: mol_type = other RNA
gaggctccgtacctcttgcg

SEQ ID NO: 9066 - RNA, 20 nt, synthetic construct
  source 1..20: mol_type = other RNA
gaggtacggagcctcctgcc

SEQ ID NO: 9067 - RNA, 20 nt, synthetic construct
  source 1..20: mol_type = other RNA
gagttcctcctccgtgagcc

SEQ ID NO: 9068 - RNA, 20 nt, synthetic construct
  source 1..20: mol_type = other RNA
gatgcccgatttcatgccca

SEQ ID NO: 9069 - RNA, 20 nt, synthetic construct
  source 1..20: mol_type = other RNA
gatggcgacctgcttctgcg

SEQ ID NO: 9070 - RNA, 20 nt, synthetic construct
  source 1..20: mol_type = other RNA
gatttcatgcccaggtcggt

SEQ ID NO: 9071 - RNA, 20 nt, synthetic construct
  source 1..20: mol_type = other RNA
gcaagaggtacggagcctcc

SEQ ID NO: 9072 - RNA, 20 nt, synthetic construct
  source 1..20: mol_type = other RNA
gcagaagcaggtcgccatcc

SEQ ID NO: 9073 - RNA, 20 nt, synthetic construct
  source 1..20: mol_type = other RNA
gcagcaggtggatggcgacc

SEQ ID NO: 9074 - RNA, 20 nt, synthetic construct
  source 1..20: mol_type = other RNA
gcaggaggctccgtacctct

SEQ ID NO: 9075 - RNA, 20 nt, synthetic construct
  source 1..20: mol_type = other RNA
gcaggtggatggcgacctgc

SEQ ID NO: 9076 - RNA, 20 nt, synthetic construct
  source 1..20: mol_type = other RNA
gcatcacccgcaagaggtac

SEQ ID NO: 9077 - RNA, 20 nt, synthetic construct
  source 1..20: mol_type = other RNA
gcatgaaatcgggcatcacc

SEQ ID NO: 9078 - RNA, 20 nt, synthetic construct
  source 1..20: mol_type = other RNA
gcccaggtcggtctggagtt

SEQ ID NO: 9079 - RNA, 20 nt, synthetic construct
  source 1..20: mol_type = other RNA
gcccgatttcatgcccaggt

SEQ ID NO: 9080 - RNA, 20 nt, synthetic construct
  source 1..20: mol_type = other RNA
gccgcagaagcaggtcgcca

SEQ ID NO: 9081 - RNA, 20 nt, synthetic construct
  source 1..20: mol_type = other RNA
gcgacctgcttctgcggctc

SEQ ID NO: 9082 - RNA, 20 nt, synthetic construct
  source 1..20: mol_type = other RNA
gcggctcacggaggaggaac

SEQ ID NO: 9083 - RNA, 20 nt, synthetic construct
  source 1..20: mol_type = other RNA
gcgggcaggaggctccgtac

SEQ ID NO: 9084 - RNA, 20 nt, synthetic construct
  source 1..20: mol_type = other RNA
gcgggtgatgcccgatttca

SEQ ID NO: 9085 - RNA, 20 nt, synthetic construct
  source 1..20: mol_type = other RNA
gctcacggaggaggaactcc

SEQ ID NO: 9086 - RNA, 20 nt, synthetic construct
  source 1..20: mol_type = other RNA
gctccgtacctcttgcgggt

SEQ ID NO: 9087 - RNA, 20 nt, synthetic construct
  source 1..20: mol_type = other RNA
gcttctgcggctcacggagg

SEQ ID NO: 9088 - RNA, 20 nt, synthetic construct
  source 1..20: mol_type = other RNA
ggaactccagaccgacctgg

SEQ ID NO: 9089 - RNA, 20 nt, synthetic construct
  source 1..20: mol_type = other RNA
ggaggaactccagaccgacc

SEQ ID NO: 9090 - RNA, 20 nt, synthetic construct
  source 1..20: mol_type = other RNA
ggaggaggaactccagaccg

SEQ ID NO: 9091 - RNA, 20 nt, synthetic construct
  source 1..20: mol_type = other RNA
ggaggctccgtacctcttgc

SEQ ID NO: 9092 - RNA, 20 nt, synthetic construct
  source 1..20: mol_type = other RNA
ggagttcctcctccgtgagc

SEQ ID NO: 9093 - RNA, 20 nt, synthetic construct
  source 1..20: mol_type = other RNA
ggatggcgacctgcttctgc

SEQ ID NO: 9094 - RNA, 20 nt, synthetic construct
  source 1..20: mol_type = other RNA
ggcaggaggctccgtacctc

SEQ ID NO: 9095 - RNA, 20 nt, synthetic construct
  source 1..20: mol_type = other RNA
ggcatcacccgcaagaggta

SEQ ID NO: 9096 - RNA, 20 nt, synthetic construct
  source 1..20: mol_type = other RNA
ggcatgaaatcgggcatcac

SEQ ID NO: 9097 - RNA, 20 nt, synthetic construct
  source 1..20: mol_type = other RNA
ggcgacctgcttctgcggct

SEQ ID NO: 9098 - RNA, 20 nt, synthetic construct
  source 1..20: mol_type = other RNA
ggcgggcaggaggctccgta

SEQ ID NO: 9099 - RNA, 20 nt, synthetic construct
  source 1..20: mol_type = other RNA
ggctcacggaggaggaactc

SEQ ID NO: 9100 - RNA, 20 nt, synthetic construct
  source 1..20: mol_type = other RNA
ggctccgtacctcttgcggg

SEQ ID NO: 9101 - RNA, 20 nt, synthetic construct
  source 1..20: mol_type = other RNA
gggcaggaggctccgtacct

SEQ ID NO: 9102 - RNA, 20 nt, synthetic construct
  source 1..20: mol_type = other RNA
gggcatcacccgcaagaggt

SEQ ID NO: 9103 - RNA, 20 nt, synthetic construct
  source 1..20: mol_type = other RNA
gggcatgaaatcgggcatca

SEQ ID NO: 9104 - RNA, 20 nt, synthetic construct
  source 1..20: mol_type = other RNA
ggggtccggcgggcaggagg

SEQ ID NO: 9105 - RNA, 20 nt, synthetic construct
  source 1..20: mol_type = other RNA
gggtccggcgggcaggaggc

SEQ ID NO: 9106 - RNA, 20 nt, synthetic construct
  source 1..20: mol_type = other RNA
gggtgatgcccgatttcatg

SEQ ID NO: 9107 - RNA, 20 nt, synthetic construct
  source 1..20: mol_type = other RNA
ggtacggagcctcctgcccg

SEQ ID NO: 9108 - RNA, 20 nt, synthetic construct
  source 1..20: mol_type = other RNA
ggtccggcgggcaggaggct

SEQ ID NO: 9109 - RNA, 20 nt, synthetic construct
  source 1..20: mol_type = other RNA
ggtcggtctggagttcctcc

SEQ ID NO: 9110 - RNA, 20 nt, synthetic construct
  source 1..20: mol_type = other RNA
ggtctggagttcctcctccg

SEQ ID NO: 9111 - RNA, 20 nt, synthetic construct
  source 1..20: mol_type = other RNA
ggtgatgcccgatttcatgc

SEQ ID NO: 9112 - RNA, 20 nt, synthetic construct
  source 1..20: mol_type = other RNA
ggtggatggcgacctgcttc

SEQ ID NO: 9113 - RNA, 20 nt, synthetic construct
  source 1..20: mol_type = other RNA
gtacctcttgcgggtgatgc

SEQ ID NO: 9114 - RNA, 20 nt, synthetic construct
  source 1..20: mol_type = other RNA
gtacggagcctcctgcccgc

SEQ ID NO: 9115 - RNA, 20 nt, synthetic construct
  source 1..20: mol_type = other RNA
gtccggcgggcaggaggctc

SEQ ID NO: 9116 - RNA, 20 nt, synthetic construct
  source 1..20: mol_type = other RNA
gtcggtctggagttcctcct

SEQ ID NO: 9117 - RNA, 20 nt, synthetic construct
  source 1..20: mol_type = other RNA
gtctggagttcctcctccgt

SEQ ID NO: 9118 - RNA, 20 nt, synthetic construct
  source 1..20: mol_type = other RNA
gtgagccgcagaagcaggtc

SEQ ID NO: 9119 - RNA, 20 nt, synthetic construct
  source 1..20: mol_type = other RNA
gtgatgcccgatttcatgcc

SEQ ID NO: 9120 - RNA, 20 nt, synthetic construct
  source 1..20: mol_type = other RNA
gtggatggcgacctgcttct

SEQ ID NO: 9121 - RNA, 20 nt, synthetic construct
  source 1..20: mol_type = other RNA
gttcctcctccgtgagccgc

SEQ ID NO: 9122 - RNA, 20 nt, synthetic construct
  source 1..20: mol_type = other RNA
tacctcttgcgggtgatgcc

SEQ ID NO: 9123 - RNA, 20 nt, synthetic construct
  source 1..20: mol_type = other RNA
tcacccgcaagaggtacgga

SEQ ID NO: 9124 - RNA, 20 nt, synthetic construct
  source 1..20: mol_type = other RNA
tcacggaggaggaactccag

SEQ ID NO: 9125 - RNA, 20 nt, synthetic construct
  source 1..20: mol_type = other RNA
tcatgcccaggtcggtctgg

SEQ ID NO: 9126 - RNA, 20 nt, synthetic construct
  source 1..20: mol_type = other RNA
tccagaccgacctgggcatg

SEQ ID NO: 9127 - RNA, 20 nt, synthetic construct
  source 1..20: mol_type = other RNA
tccggcgggcaggaggctcc

SEQ ID NO: 9128 - RNA, 20 nt, synthetic construct
  source 1..20: mol_type = other RNA
tccgtacctcttgcgggtga

SEQ ID NO: 9129 - RNA, 20 nt, synthetic construct
  source 1..20: mol_type = other RNA
tccgtgagccgcagaagcag

SEQ ID NO: 9130 - RNA, 20 nt, synthetic construct
  source 1..20: mol_type = other RNA
tcctccgtgagccgcagaag

SEQ ID NO: 9131 - RNA, 20 nt, synthetic construct
  source 1..20: mol_type = other RNA
tcctcctccgtgagccgcag

SEQ ID NO: 9132 - RNA, 20 nt, synthetic construct
  source 1..20: mol_type = other RNA
tcgggcatcacccgcaagag

SEQ ID NO: 9133 - RNA, 20 nt, synthetic construct
  source 1..20: mol_type = other RNA
tcggtctggagttcctcctc

SEQ ID NO: 9134 - RNA, 20 nt, synthetic construct
  source 1..20: mol_type = other RNA
tctgcggctcacggaggagg

SEQ ID NO: 9135 - RNA, 20 nt, synthetic construct
  source 1..20: mol_type = other RNA
tctggagttcctcctccgtg

SEQ ID NO: 9136 - RNA, 20 nt, synthetic construct
  source 1..20: mol_type = other RNA
tcttgcgggtgatgcccgat

SEQ ID NO: 9137 - RNA, 20 nt, synthetic construct
  source 1..20: mol_type = other RNA
tgaaatcgggcatcacccgc

SEQ ID NO: 9138 - RNA, 20 nt, synthetic construct
  source 1..20: mol_type = other RNA
tgagccgcagaagcaggtcg

SEQ ID NO: 9139 - RNA, 20 nt, synthetic construct
  source 1..20: mol_type = other RNA
tgatgcccgatttcatgccc

SEQ ID NO: 9140 - RNA, 20 nt, synthetic construct
  source 1..20: mol_type = other RNA
tgcccaggtcggtctggagt

SEQ ID NO: 9141 - RNA, 20 nt, synthetic construct
  source 1..20: mol_type = other RNA
tgcccgatttcatgcccagg

SEQ ID NO: 9142 - RNA, 20 nt, synthetic construct
  source 1..20: mol_type = other RNA
tgcggctcacggaggaggaa

SEQ ID NO: 9143 - RNA, 20 nt, synthetic construct
  source 1..20: mol_type = other RNA
tgcgggtgatgcccgatttc

SEQ ID NO: 9144 - RNA, 20 nt, synthetic construct
  source 1..20: mol_type = other RNA
tgcttctgcggctcacggag

SEQ ID NO: 9145 - RNA, 20 nt, synthetic construct
  source 1..20: mol_type = other RNA
tggagttcctcctccgtgag

SEQ ID NO: 9146 - RNA, 20 nt, synthetic construct
  source 1..20: mol_type = other RNA
tggatggcgacctgcttctg

SEQ ID NO: 9147 - RNA, 20 nt, synthetic construct
  source 1..20: mol_type = other RNA
tggcgacctgcttctgcggc

SEQ ID NO: 9148 - RNA, 20 nt, synthetic construct
  source 1..20: mol_type = other RNA
tgggcatgaaatcgggcatc

SEQ ID NO: 9149 - RNA, 20 nt, synthetic construct
  source 1..20: mol_type = other RNA
ttcatgcccaggtcggtctg

SEQ ID NO: 9150 - RNA, 20 nt, synthetic construct
  source 1..20: mol_type = other RNA
ttcctcctccgtgagccgca

SEQ ID NO: 9151 - RNA, 20 nt, synthetic construct
  source 1..20: mol_type = other RNA
ttctgcggctcacggaggag

SEQ ID NO: 9152 - RNA, 20 nt, synthetic construct
  source 1..20: mol_type = other RNA
ttgcgggtgatgcccgattt

SEQ ID NO: 9153 - RNA, 20 nt, synthetic construct
  source 1..20: mol_type = other RNA
tttcatgcccaggtcggtct

SEQ ID NO: 9154 - RNA, 21 nt, synthetic construct
  source 1..21: mol_type = other RNA
aaatcgggcatcacccgcaag

SEQ ID NO: 9155 - RNA, 21 nt, synthetic construct
  source 1..21: mol_type = other RNA
aactccagaccgacctgggca

SEQ ID NO: 9156 - RNA, 21 nt, synthetic construct
  source 1..21: mol_type = other RNA
aagaggtacggagcctcctgc

SEQ ID NO: 9157 - RNA, 21 nt, synthetic construct
  source 1..21: mol_type = other RNA
aatcgggcatcacccgcaaga

SEQ ID NO: 9158 - RNA, 21 nt, synthetic construct
  source 1..21: mol_type = other RNA
acccgcaagaggtacggagcc

SEQ ID NO: 9159 - RNA, 21 nt, synthetic construct
  source 1..21: mol_type = other RNA
accgacctgggcatgaaatcg

SEQ ID NO: 9160 - RNA, 21 nt, synthetic construct
  source 1..21: mol_type = other RNA
acctcttgcgggtgatgcccg

SEQ ID NO: 9161 - RNA, 21 nt, synthetic construct
  source 1..21: mol_type = other RNA
acctgcttctgcggctcacgg

SEQ ID NO: 9162 - RNA, 21 nt, synthetic construct
  source 1..21: mol_type = other RNA
acctgggcatgaaatcgggca

SEQ ID NO: 9163 - RNA, 21 nt, synthetic construct
  source 1..21: mol_type = other RNA
acggaggaggaactccagacc

SEQ ID NO: 9164 - RNA, 21 nt, synthetic construct
  source 1..21: mol_type = other RNA
actccagaccgacctgggcat

SEQ ID NO: 9165 - RNA, 21 nt, synthetic construct
  source 1..21: mol_type = other RNA
agaagcaggtcgccatccacc

SEQ ID NO: 9166 - RNA, 21 nt, synthetic construct
  source 1..21: mol_type = other RNA
agaccgacctgggcatgaaat

SEQ ID NO: 9167 - RNA, 21 nt, synthetic construct
  source 1..21: mol_type = other RNA
agaggtacggagcctcctgcc

SEQ ID NO: 9168 - RNA, 21 nt, synthetic construct
  source 1..21: mol_type = other RNA
agcagcaggtggatggcgacc

SEQ ID NO: 9169 - RNA, 21 nt, synthetic construct
  source 1..21: mol_type = other RNA
agcaggtggatggcgacctgc

SEQ ID NO: 9170 - RNA, 21 nt, synthetic construct
  source 1..21: mol_type = other RNA
agccgcagaagcaggtcgcca

SEQ ID NO: 9171 - RNA, 21 nt, synthetic construct
  source 1..21: mol_type = other RNA
aggaactccagaccgacctgg

SEQ ID NO: 9172 - RNA, 21 nt, synthetic construct
  source 1..21: mol_type = other RNA
aggaggaactccagaccgacc

SEQ ID NO: 9173 - RNA, 21 nt, synthetic construct
  source 1..21: mol_type = other RNA
aggaggctccgtacctcttgc

SEQ ID NO: 9174 - RNA, 21 nt, synthetic construct
  source 1..21: mol_type = other RNA
aggctccgtacctcttgcggg

SEQ ID NO: 9175 - RNA, 21 nt, synthetic construct
  source 1..21: mol_type = other RNA
aggtacggagcctcctgcccg

SEQ ID NO: 9176 - RNA, 21 nt, synthetic construct
  source 1..21: mol_type = other RNA
aggtcggtctggagttcctcc

SEQ ID NO: 9177 - RNA, 21 nt, synthetic construct
  source 1..21: mol_type = other RNA
aggtggatggcgacctgcttc

SEQ ID NO: 9178 - RNA, 21 nt, synthetic construct
  source 1..21: mol_type = other RNA
agttcctcctccgtgagccgc

SEQ ID NO: 9179 - RNA, 21 nt, synthetic construct
  source 1..21: mol_type = other RNA
atcacccgcaagaggtacgga

SEQ ID NO: 9180 - RNA, 21 nt, synthetic construct
  source 1..21: mol_type = other RNA
atcgggcatcacccgcaagag

SEQ ID NO: 9181 - RNA, 21 nt, synthetic construct
  source 1..21: mol_type = other RNA
atgaaatcgggcatcacccgc

SEQ ID NO: 9182 - RNA, 21 nt, synthetic construct
  source 1..21: mol_type = other RNA
atgcccaggtcggtctggagt

SEQ ID NO: 9183 - RNA, 21 nt, synthetic construct
  source 1..21: mol_type = other RNA
atgcccgatttcatgcccagg

SEQ ID NO: 9184 - RNA, 21 nt, synthetic construct
  source 1..21: mol_type = other RNA
atggcgacctgcttctgcggc

SEQ ID NO: 9185 - RNA, 21 nt, synthetic construct
  source 1..21: mol_type = other RNA
atttcatgcccaggtcggtct

SEQ ID NO: 9186 - RNA, 21 nt, synthetic construct
  source 1..21: mol_type = other RNA
caagaggtacggagcctcctg

SEQ ID NO: 9187 - RNA, 21 nt, synthetic construct
  source 1..21: mol_type = other RNA
cacccgcaagaggtacggagc

SEQ ID NO: 9188 - RNA, 21 nt, synthetic construct
  source 1..21: mol_type = other RNA
cacggaggaggaactccagac

SEQ ID NO: 9189 - RNA, 21 nt, synthetic construct
  source 1..21: mol_type = other RNA
cagaagcaggtcgccatccac

SEQ ID NO: 9190 - RNA, 21 nt, synthetic construct
  source 1..21: mol_type = other RNA
cagaccgacctgggcatgaaa

SEQ ID NO: 9191 - RNA, 21 nt, synthetic construct
  source 1..21: mol_type = other RNA
cagcaggtggatggcgacctg

SEQ ID NO: 9192 - RNA, 21 nt, synthetic construct
  source 1..21: mol_type = other RNA
caggaggctccgtacctcttg

SEQ ID NO: 9193 - RNA, 21 nt, synthetic construct
  source 1..21: mol_type = other RNA
caggtcggtctggagttcctc

SEQ ID NO: 9194 - RNA, 21 nt, synthetic construct
  source 1..21: mol_type = other RNA
caggtggatggcgacctgctt

SEQ ID NO: 9195 - RNA, 21 nt, synthetic construct
  source 1..21: mol_type = other RNA
catcacccgcaagaggtacgg

SEQ ID NO: 9196 - RNA, 21 nt, synthetic construct
  source 1..21: mol_type = other RNA
catgaaatcgggcatcacccg

SEQ ID NO: 9197 - RNA, 21 nt, synthetic construct
  source 1..21: mol_type = other RNA
catgcccaggtcggtctggag

SEQ ID NO: 9198 - RNA, 21 nt, synthetic construct
  source 1..21: mol_type = other RNA
ccagaccgacctgggcatgaa

SEQ ID NO: 9199 - RNA, 21 nt, synthetic construct
  source 1..21: mol_type = other RNA
ccaggtcggtctggagttcct

SEQ ID NO: 9200 - RNA, 21 nt, synthetic construct
  source 1..21: mol_type = other RNA
cccaggtcggtctggagttcc

SEQ ID NO: 9201 - RNA, 21 nt, synthetic construct
  source 1..21: mol_type = other RNA
cccgatttcatgcccaggtcg

SEQ ID NO: 9202 - RNA, 21 nt, synthetic construct
  source 1..21: mol_type = other RNA
cccgcaagaggtacggagcct

SEQ ID NO: 9203 - RNA, 21 nt, synthetic construct
  source 1..21: mol_type = other RNA
ccgacctgggcatgaaatcgg

SEQ ID NO: 9204 - RNA, 21 nt, synthetic construct
  source 1..21: mol_type = other RNA
ccgatttcatgcccaggtcgg

SEQ ID NO: 9205 - RNA, 21 nt, synthetic construct
  source 1..21: mol_type = other RNA
ccgcaagaggtacggagcctc

SEQ ID NO: 9206 - RNA, 21 nt, synthetic construct
  source 1..21: mol_type = other RNA
ccgcagaagcaggtcgccatc

SEQ ID NO: 9207 - RNA, 21 nt, synthetic construct
  source 1..21: mol_type = other RNA
ccggcgggcaggaggctccgt

SEQ ID NO: 9208 - RNA, 21 nt, synthetic construct
  source 1..21: mol_type = other RNA
ccgtacctcttgcgggtgatg

SEQ ID NO: 9209 - RNA, 21 nt, synthetic construct
  source 1..21: mol_type = other RNA
ccgtgagccgcagaagcaggt

SEQ ID NO: 9210 - RNA, 21 nt, synthetic construct
  source 1..21: mol_type = other RNA
cctccgtgagccgcagaagca

SEQ ID NO: 9211 - RNA, 21 nt, synthetic construct
  source 1..21: mol_type = other RNA
cctcctccgtgagccgcagaa

SEQ ID NO: 9212 - RNA, 21 nt, synthetic construct
  source 1..21: mol_type = other RNA
cctcttgcgggtgatgcccga

SEQ ID NO: 9213 - RNA, 21 nt, synthetic construct
  source 1..21: mol_type = other RNA
cctgcttctgcggctcacgga

SEQ ID NO: 9214 - RNA, 21 nt, synthetic construct
  source 1..21: mol_type = other RNA
cctgggcatgaaatcgggcat

SEQ ID NO: 9215 - RNA, 21 nt, synthetic construct
  source 1..21: mol_type = other RNA
cgacctgcttctgcggctcac

SEQ ID NO: 9216 - RNA, 21 nt, synthetic construct
  source 1..21: mol_type = other RNA
cgacctgggcatgaaatcggg

SEQ ID NO: 9217 - RNA, 21 nt, synthetic construct
  source 1..21: mol_type = other RNA
cgatttcatgcccaggtcggt

SEQ ID NO: 9218 - RNA, 21 nt, synthetic construct
  source 1..21: mol_type = other RNA
cgcaagaggtacggagcctcc

SEQ ID NO: 9219 - RNA, 21 nt, synthetic construct
  source 1..21: mol_type = other RNA
cgcagaagcaggtcgccatcc

SEQ ID NO: 9220 - RNA, 21 nt, synthetic construct
  source 1..21: mol_type = other RNA
cggaggaggaactccagaccg

SEQ ID NO: 9221 - RNA, 21 nt, synthetic construct
  source 1..21: mol_type = other RNA
cggcgggcaggaggctccgta

SEQ ID NO: 9222 - RNA, 21 nt, synthetic construct
  source 1..21: mol_type = other RNA
cggctcacggaggaggaactc

SEQ ID NO: 9223 - RNA, 21 nt, synthetic construct
  source 1..21: mol_type = other RNA
cgggcaggaggctccgtacct

SEQ ID NO: 9224 - RNA, 21 nt, synthetic construct
  source 1..21: mol_type = other RNA
cgggcatcacccgcaagaggt

SEQ ID NO: 9225 - RNA, 21 nt, synthetic construct
  source 1..21: mol_type = other RNA
cgggtgatgcccgatttcatg

SEQ ID NO: 9226 - RNA, 21 nt, synthetic construct
  source 1..21: mol_type = other RNA
cggtctggagttcctcctccg

SEQ ID NO: 9227 - RNA, 21 nt, synthetic construct
  source 1..21: mol_type = other RNA
cgtacctcttgcgggtgatgc

SEQ ID NO: 9228 - RNA, 21 nt, synthetic construct
  source 1..21: mol_type = other RNA
cgtgagccgcagaagcaggtc

SEQ ID NO: 9229 - RNA, 21 nt, synthetic construct
  source 1..21: mol_type = other RNA
ctcacggaggaggaactccag

SEQ ID NO: 9230 - RNA, 21 nt, synthetic construct
  source 1..21: mol_type = other RNA
ctccagaccgacctgggcatg

SEQ ID NO: 9231 - RNA, 21 nt, synthetic construct
  source 1..21: mol_type = other RNA
ctccgtacctcttgcgggtga

SEQ ID NO: 9232 - RNA, 21 nt, synthetic construct
  source 1..21: mol_type = other RNA
ctccgtgagccgcagaagcag

SEQ ID NO: 9233 - RNA, 21 nt, synthetic construct
  source 1..21: mol_type = other RNA
ctcctccgtgagccgcagaag

SEQ ID NO: 9234 - RNA, 21 nt, synthetic construct
  source 1..21: mol_type = other RNA
ctcttgcgggtgatgcccgat

SEQ ID NO: 9235 - RNA, 21 nt, synthetic construct
  source 1..21: mol_type = other RNA
ctgcggctcacggaggaggaa

SEQ ID NO: 9236 - RNA, 21 nt, synthetic construct
  source 1..21: mol_type = other RNA
ctgcttctgcggctcacggag

SEQ ID NO: 9237 - RNA, 21 nt, synthetic construct
  source 1..21: mol_type = other RNA
ctggagttcctcctccgtgag

SEQ ID NO: 9238 - RNA, 21 nt, synthetic construct
  source 1..21: mol_type = other RNA
ctgggcatgaaatcgggcatc

SEQ ID NO: 9239 - RNA, 21 nt, synthetic construct
  source 1..21: mol_type = other RNA
cttctgcggctcacggaggag

SEQ ID NO: 9240 - RNA, 21 nt, synthetic construct
  source 1..21: mol_type = other RNA
cttgcgggtgatgcccgattt

SEQ ID NO: 9241 - RNA, 21 nt, synthetic construct
  source 1..21: mol_type = other RNA
gaaatcgggcatcacccgcaa

SEQ ID NO: 9242 - RNA, 21 nt, synthetic construct
  source 1..21: mol_type = other RNA
gaactccagaccgacctgggc

SEQ ID NO: 9243 - RNA, 21 nt, synthetic construct
  source 1..21: mol_type = other RNA
gaccgacctgggcatgaaatc

SEQ ID NO: 9244 - RNA, 21 nt, synthetic construct
  source 1..21: mol_type = other RNA
gacctgcttctgcggctcacg

SEQ ID NO: 9245 - RNA, 21 nt, synthetic construct
  source 1..21: mol_type = other RNA
gacctgggcatgaaatcgggc

SEQ ID NO: 9246 - RNA, 21 nt, synthetic construct
  source 1..21: mol_type = other RNA
gagcagcaggtggatggcgac

SEQ ID NO: 9247 - RNA, 21 nt, synthetic construct
  source 1..21: mol_type = other RNA
gagccgcagaagcaggtcgcc

SEQ ID NO: 9248 - RNA, 21 nt, synthetic construct
  source 1..21: mol_type = other RNA
gaggaactccagaccgacctg

SEQ ID NO: 9249 - RNA, 21 nt, synthetic construct
  source 1..21: mol_type = other RNA
gaggaggaactccagaccgac

SEQ ID NO: 9250 - RNA, 21 nt, synthetic construct
  source 1..21: mol_type = other RNA
gaggctccgtacctcttgcgg

SEQ ID NO: 9251 - RNA, 21 nt, synthetic construct
  source 1..21: mol_type = other RNA
gaggtacggagcctcctgccc

SEQ ID NO: 9252 - RNA, 21 nt, synthetic construct
  source 1..21: mol_type = other RNA
gagttcctcctccgtgagccg

SEQ ID NO: 9253 - RNA, 21 nt, synthetic construct
  source 1..21: mol_type = other RNA
gatgcccgatttcatgcccag

SEQ ID NO: 9254 - RNA, 21 nt, synthetic construct
  source 1..21: mol_type = other RNA
gatggcgacctgcttctgcgg

SEQ ID NO: 9255 - RNA, 21 nt, synthetic construct
  source 1..21: mol_type = other RNA
gatttcatgcccaggtcggtc

SEQ ID NO: 9256 - RNA, 21 nt, synthetic construct
  source 1..21: mol_type = other RNA
gcaagaggtacggagcctcct

SEQ ID NO: 9257 - RNA, 21 nt, synthetic construct
  source 1..21: mol_type = other RNA
gcagaagcaggtcgccatcca

SEQ ID NO: 9258 - RNA, 21 nt, synthetic construct
  source 1..21: mol_type = other RNA
gcagcaggtggatggcgacct

SEQ ID NO: 9259 - RNA, 21 nt, synthetic construct
  source 1..21: mol_type = other RNA
gcaggaggctccgtacctctt

SEQ ID NO: 9260 - RNA, 21 nt, synthetic construct
  source 1..21: mol_type = other RNA
gcaggtggatggcgacctgct

SEQ ID NO: 9261 - RNA, 21 nt, synthetic construct
  source 1..21: mol_type = other RNA
gcatcacccgcaagaggtacg

SEQ ID NO: 9262 - RNA, 21 nt, synthetic construct
  source 1..21: mol_type = other RNA
gcatgaaatcgggcatcaccc

SEQ ID NO: 9263 - RNA, 21 nt, synthetic construct
  source 1..21: mol_type = other RNA
gcccaggtcggtctggagttc

SEQ ID NO: 9264 - RNA, 21 nt, synthetic construct
  source 1..21: mol_type = other RNA
gcccgatttcatgcccaggtc

SEQ ID NO: 9265 - RNA, 21 nt, synthetic construct
  source 1..21: mol_type = other RNA
gccgcagaagcaggtcgccat

SEQ ID NO: 9266 - RNA, 21 nt, synthetic construct
  source 1..21: mol_type = other RNA
gcgacctgcttctgcggctca

SEQ ID NO: 9267 - RNA, 21 nt, synthetic construct
  source 1..21: mol_type = other RNA
gcggctcacggaggaggaact

SEQ ID NO: 9268 - RNA, 21 nt, synthetic construct
  source 1..21: mol_type = other RNA
gcgggcaggaggctccgtacc

SEQ ID NO: 9269 - RNA, 21 nt, synthetic construct
  source 1..21: mol_type = other RNA
gcgggtgatgcccgatttcat

SEQ ID NO: 9270 - RNA, 21 nt, synthetic construct
  source 1..21: mol_type = other RNA
gctcacggaggaggaactcca

SEQ ID NO: 9271 - RNA, 21 nt, synthetic construct
  source 1..21: mol_type = other RNA
gctccgtacctcttgcgggtg

SEQ ID NO: 9272 - RNA, 21 nt, synthetic construct
  source 1..21: mol_type = other RNA
gcttctgcggctcacggagga

SEQ ID NO: 9273 - RNA, 21 nt, synthetic construct
  source 1..21: mol_type = other RNA
ggaactccagaccgacctggg

SEQ ID NO: 9274 - RNA, 21 nt, synthetic construct
  source 1..21: mol_type = other RNA
ggaggaactccagaccgacct

SEQ ID NO: 9275 - RNA, 21 nt, synthetic construct
  source 1..21: mol_type = other RNA
ggaggaggaactccagaccga

SEQ ID NO: 9276 - RNA, 21 nt, synthetic construct
  source 1..21: mol_type = other RNA
ggaggctccgtacctcttgcg

SEQ ID NO: 9277 - RNA, 21 nt, synthetic construct
  source 1..21: mol_type = other RNA
ggagttcctcctccgtgagcc

SEQ ID NO: 9278 - RNA, 21 nt, synthetic construct
  source 1..21: mol_type = other RNA
ggatggcgacctgcttctgcg

SEQ ID NO: 9279 - RNA, 21 nt, synthetic construct
  source 1..21: mol_type = other RNA
ggcaggaggctccgtacctct

SEQ ID NO: 9280 - RNA, 21 nt, synthetic construct
  source 1..21: mol_type = other RNA
ggcatcacccgcaagaggtac

SEQ ID NO: 9281 - RNA, 21 nt, synthetic construct
  source 1..21: mol_type = other RNA
ggcatgaaatcgggcatcacc

SEQ ID NO: 9282 - RNA, 21 nt, synthetic construct
  source 1..21: mol_type = other RNA
ggcgacctgcttctgcggctc

SEQ ID NO: 9283 - RNA, 21 nt, synthetic construct
  source 1..21: mol_type = other RNA
ggcgggcaggaggctccgtac

SEQ ID NO: 9284 - RNA, 21 nt, synthetic construct
  source 1..21: mol_type = other RNA
ggctcacggaggaggaactcc

SEQ ID NO: 9285 - RNA, 21 nt, synthetic construct
  source 1..21: mol_type = other RNA
ggctccgtacctcttgcgggt

SEQ ID NO: 9286 - RNA, 21 nt, synthetic construct
  source 1..21: mol_type = other RNA
gggcaggaggctccgtacctc

SEQ ID NO: 9287 - RNA, 21 nt, synthetic construct
  source 1..21: mol_type = other RNA
gggcatcacccgcaagaggta

SEQ ID NO: 9288 - RNA, 21 nt, synthetic construct
  source 1..21: mol_type = other RNA
gggcatgaaatcgggcatcac

SEQ ID NO: 9289 - RNA, 21 nt, synthetic construct
  source 1..21: mol_type = other RNA
ggggtccggcgggcaggaggc

SEQ ID NO: 9290 - RNA, 21 nt, synthetic construct
  source 1..21: mol_type = other RNA
gggtccggcgggcaggaggct

SEQ ID NO: 9291 - RNA, 21 nt, synthetic construct
  source 1..21: mol_type = other RNA
gggtgatgcccgatttcatgc

SEQ ID NO: 9292 - RNA, 21 nt, synthetic construct
  source 1..21: mol_type = other RNA
ggtacggagcctcctgcccgc

SEQ ID NO: 9293 - RNA, 21 nt, synthetic construct
  source 1..21: mol_type = other RNA
ggtccggcgggcaggaggctc

SEQ ID NO: 9294 - RNA, 21 nt, synthetic construct
  source 1..21: mol_type = other RNA
ggtcggtctggagttcctcct

SEQ ID NO: 9295 - RNA, 21 nt, synthetic construct
  source 1..21: mol_type = other RNA
ggtctggagttcctcctccgt

SEQ ID NO: 9296 - RNA, 21 nt, synthetic construct
  source 1..21: mol_type = other RNA
ggtgatgcccgatttcatgcc

SEQ ID NO: 9297 - RNA, 21 nt, synthetic construct
  source 1..21: mol_type = other RNA
ggtggatggcgacctgcttct

SEQ ID NO: 9298 - RNA, 21 nt, synthetic construct
  source 1..21: mol_type = other RNA
gtacctcttgcgggtgatgcc

SEQ ID NO: 9299 - RNA, 21 nt, synthetic construct
  source 1..21: mol_type = other RNA
gtacggagcctcctgcccgcc

SEQ ID NO: 9300 - RNA, 21 nt, synthetic construct
  source 1..21: mol_type = other RNA
gtccggcgggcaggaggctcc

SEQ ID NO: 9301 - RNA, 21 nt, synthetic construct
  source 1..21: mol_type = other RNA
gtcggtctggagttcctcctc

SEQ ID NO: 9302 - RNA, 21 nt, synthetic construct
  source 1..21: mol_type = other RNA
gtctggagttcctcctccgtg

SEQ ID NO: 9303 - RNA, 21 nt, synthetic construct
  source 1..21: mol_type = other RNA
gtgagccgcagaagcaggtcg

SEQ ID NO: 9304 - RNA, 21 nt, synthetic construct
  source 1..21: mol_type = other RNA
gtgatgcccgatttcatgccc

SEQ ID NO: 9305 - RNA, 21 nt, synthetic construct
  source 1..21: mol_type = other RNA
gtggatggcgacctgcttctg

SEQ ID NO: 9306 - RNA, 21 nt, synthetic construct
  source 1..21: mol_type = other RNA
gttcctcctccgtgagccgca

SEQ ID NO: 9307 - RNA, 21 nt, synthetic construct
  source 1..21: mol_type = other RNA
tacctcttgcgggtgatgccc

SEQ ID NO: 9308 - RNA, 21 nt, synthetic construct
  source 1..21: mol_type = other RNA
tcacccgcaagaggtacggag

SEQ ID NO: 9309 - RNA, 21 nt, synthetic construct
  source 1..21: mol_type = other RNA
tcacggaggaggaactccaga

SEQ ID NO: 9310 - RNA, 21 nt, synthetic construct
  source 1..21: mol_type = other RNA
tcatgcccaggtcggtctgga

SEQ ID NO: 9311 - RNA, 21 nt, synthetic construct
  source 1..21: mol_type = other RNA
tccagaccgacctgggcatga

SEQ ID NO: 9312 - RNA, 21 nt, synthetic construct
  source 1..21: mol_type = other RNA
tccggcgggcaggaggctccg

SEQ ID NO: 9313 - RNA, 21 nt, synthetic construct
  source 1..21: mol_type = other RNA
tccgtacctcttgcgggtgat

SEQ ID NO: 9314 - RNA, 21 nt, synthetic construct
  source 1..21: mol_type = other RNA
tccgtgagccgcagaagcagg

SEQ ID NO: 9315 - RNA, 21 nt, synthetic construct
  source 1..21: mol_type = other RNA
tcctccgtgagccgcagaagc

SEQ ID NO: 9316 - RNA, 21 nt, synthetic construct
  source 1..21: mol_type = other RNA
tcctcctccgtgagccgcaga

SEQ ID NO: 9317 - RNA, 21 nt, synthetic construct
  source 1..21: mol_type = other RNA
tcgggcatcacccgcaagagg

SEQ ID NO: 9318 - RNA, 21 nt, synthetic construct
  source 1..21: mol_type = other RNA
tcggtctggagttcctcctcc

SEQ ID NO: 9319 - RNA, 21 nt, synthetic construct
  source 1..21: mol_type = other RNA
tctgcggctcacggaggagga

SEQ ID NO: 9320 - RNA, 21 nt, synthetic construct
  source 1..21: mol_type = other RNA
tctggagttcctcctccgtga

SEQ ID NO: 9321 - RNA, 21 nt, synthetic construct
  source 1..21: mol_type = other RNA
tcttgcgggtgatgcccgatt

SEQ ID NO: 9322 - RNA, 21 nt, synthetic construct
  source 1..21: mol_type = other RNA
tgaaatcgggcatcacccgca

SEQ ID NO: 9323 - RNA, 21 nt, synthetic construct
  source 1..21: mol_type = other RNA
tgagccgcagaagcaggtcgc

SEQ ID NO: 9324 - RNA, 21 nt, synthetic construct
  source 1..21: mol_type = other RNA
tgatgcccgatttcatgccca

SEQ ID NO: 9325 - RNA, 21 nt, synthetic construct
  source 1..21: mol_type = other RNA
tgcccaggtcggtctggagtt

SEQ ID NO: 9326 - RNA, 21 nt, synthetic construct
  source 1..21: mol_type = other RNA
tgcccgatttcatgcccaggt

SEQ ID NO: 9327 - RNA, 21 nt, synthetic construct
  source 1..21: mol_type = other RNA
tgcggctcacggaggaggaac

SEQ ID NO: 9328 - RNA, 21 nt, synthetic construct
  source 1..21: mol_type = other RNA
tgcgggtgatgcccgatttca

SEQ ID NO: 9329 - RNA, 21 nt, synthetic construct
  source 1..21: mol_type = other RNA
tgcttctgcggctcacggagg

SEQ ID NO: 9330 - RNA, 21 nt, synthetic construct
  source 1..21: mol_type = other RNA
tggagttcctcctccgtgagc

SEQ ID NO: 9331 - RNA, 21 nt, synthetic construct
  source 1..21: mol_type = other RNA
tggatggcgacctgcttctgc

SEQ ID NO: 9332 - RNA, 21 nt, synthetic construct
  source 1..21: mol_type = other RNA
tggcgacctgcttctgcggct

SEQ ID NO: 9333 - RNA, 21 nt, synthetic construct
  source 1..21: mol_type = other RNA
tgggcatgaaatcgggcatca

SEQ ID NO: 9334 - RNA, 21 nt, synthetic construct
  source 1..21: mol_type = other RNA
tggggtccggcgggcaggagg

SEQ ID NO: 9335 - RNA, 21 nt, synthetic construct
  source 1..21: mol_type = other RNA
ttcatgcccaggtcggtctgg

SEQ ID NO: 9336 - RNA, 21 nt, synthetic construct
  source 1..21: mol_type = other RNA
ttcctcctccgtgagccgcag

SEQ ID NO: 9337 - RNA, 21 nt, synthetic construct
  source 1..21: mol_type = other RNA
ttctgcggctcacggaggagg

SEQ ID NO: 9338 - RNA, 21 nt, synthetic construct
  source 1..21: mol_type = other RNA
ttgcgggtgatgcccgatttc

SEQ ID NO: 9339 - RNA, 21 nt, synthetic construct
  source 1..21: mol_type = other RNA
tttcatgcccaggtcggtctg

SEQ ID NO: 9340 - RNA, 22 nt, synthetic construct
  source 1..22: mol_type = other RNA
aaatcgggcatcacccgcaaga

SEQ ID NO: 9341 - RNA, 22 nt, synthetic construct
  source 1..22: mol_type = other RNA
aactccagaccgacctgggcat

SEQ ID NO: 9342 - RNA, 22 nt, synthetic construct
  source 1..22: mol_type = other RNA
aagaggtacggagcctcctgcc

SEQ ID NO: 9343 - RNA, 22 nt, synthetic construct
  source 1..22: mol_type = other RNA
aatcgggcatcacccgcaagag

SEQ ID NO: 9344 - RNA, 22 nt, synthetic construct
  source 1..22: mol_type = other RNA
acccgcaagaggtacggagcct

SEQ ID NO: 9345 - RNA, 22 nt, synthetic construct
  source 1..22: mol_type = other RNA
accgacctgggcatgaaatcgg

SEQ ID NO: 9346 - RNA, 22 nt, synthetic construct
  source 1..22: mol_type = other RNA
acctcttgcgggtgatgcccga

SEQ ID NO: 9347 - RNA, 22 nt, synthetic construct
  source 1..22: mol_type = other RNA
acctgcttctgcggctcacgga

SEQ ID NO: 9348 - RNA, 22 nt, synthetic construct
  source 1..22: mol_type = other RNA
acctgggcatgaaatcgggcat

SEQ ID NO: 9349 - RNA, 22 nt, synthetic construct
  source 1..22: mol_type = other RNA
acggaggaggaactccagaccg

SEQ ID NO: 9350 - RNA, 22 nt, synthetic construct
  source 1..22: mol_type = other RNA
actccagaccgacctgggcatg

SEQ ID NO: 9351 - RNA, 22 nt, synthetic construct
  source 1..22: mol_type = other RNA
agaccgacctgggcatgaaatc

SEQ ID NO: 9352 - RNA, 22 nt, synthetic construct
  source 1..22: mol_type = other RNA
agaggtacggagcctcctgccc

SEQ ID NO: 9353 - RNA, 22 nt, synthetic construct
  source 1..22: mol_type = other RNA
agcagcaggtggatggcgacct

SEQ ID NO: 9354 - RNA, 22 nt, synthetic construct
  source 1..22: mol_type = other RNA
agcaggtggatggcgacctgct

SEQ ID NO: 9355 - RNA, 22 nt, synthetic construct
  source 1..22: mol_type = other RNA
agccgcagaagcaggtcgccat

SEQ ID NO: 9356 - RNA, 22 nt, synthetic construct
  source 1..22: mol_type = other RNA
aggaactccagaccgacctggg

SEQ ID NO: 9357 - RNA, 22 nt, synthetic construct
  source 1..22: mol_type = other RNA
aggaggaactccagaccgacct

SEQ ID NO: 9358 - RNA, 22 nt, synthetic construct
  source 1..22: mol_type = other RNA
aggaggctccgtacctcttgcg

SEQ ID NO: 9359 - RNA, 22 nt, synthetic construct
  source 1..22: mol_type = other RNA
aggctccgtacctcttgcgggt

SEQ ID NO: 9360 - RNA, 22 nt, synthetic construct
  source 1..22: mol_type = other RNA
aggtacggagcctcctgcccgc

SEQ ID NO: 9361 - RNA, 22 nt, synthetic construct
  source 1..22: mol_type = other RNA
aggtcggtctggagttcctcct

SEQ ID NO: 9362 - RNA, 22 nt, synthetic construct
  source 1..22: mol_type = other RNA
aggtggatggcgacctgcttct

SEQ ID NO: 9363 - RNA, 22 nt, synthetic construct
  source 1..22: mol_type = other RNA
agttcctcctccgtgagccgca

SEQ ID NO: 9364 - RNA, 22 nt, synthetic construct
  source 1..22: mol_type = other RNA
atcacccgcaagaggtacggag

SEQ ID NO: 9365 - RNA, 22 nt, synthetic construct
  source 1..22: mol_type = other RNA
atcgggcatcacccgcaagagg

SEQ ID NO: 9366 - RNA, 22 nt, synthetic construct
  source 1..22: mol_type = other RNA
atgaaatcgggcatcacccgca

SEQ ID NO: 9367 - RNA, 22 nt, synthetic construct
  source 1..22: mol_type = other RNA
atgcccaggtcggtctggagtt

SEQ ID NO: 9368 - RNA, 22 nt, synthetic construct
  source 1..22: mol_type = other RNA
atgcccgatttcatgcccaggt

SEQ ID NO: 9369 - RNA, 22 nt, synthetic construct
  source 1..22: mol_type = other RNA
atggcgacctgcttctgcggct

SEQ ID NO: 9370 - RNA, 22 nt, synthetic construct
  source 1..22: mol_type = other RNA
atttcatgcccaggtcggtctg

SEQ ID NO: 9371 - RNA, 22 nt, synthetic construct
  source 1..22: mol_type = other RNA
caagaggtacggagcctcctgc

SEQ ID NO: 9372 - RNA, 22 nt, synthetic construct
  source 1..22: mol_type = other RNA
cacccgcaagaggtacggagcc

SEQ ID NO: 9373 - RNA, 22 nt, synthetic construct
  source 1..22: mol_type = other RNA
cacggaggaggaactccagacc

SEQ ID NO: 9374 - RNA, 22 nt, synthetic construct
  source 1..22: mol_type = other RNA
cagaagcaggtcgccatccacc

SEQ ID NO: 9375 - RNA, 22 nt, synthetic construct
  source 1..22: mol_type = other RNA
cagaccgacctgggcatgaaat

SEQ ID NO: 9376 - RNA, 22 nt, synthetic construct
  source 1..22: mol_type = other RNA
cagcaggtggatggcgacctgc

SEQ ID NO: 9377 - RNA, 22 nt, synthetic construct
  source 1..22: mol_type = other RNA
caggaggctccgtacctcttgc

SEQ ID NO: 9378 - RNA, 22 nt, synthetic construct
  source 1..22: mol_type = other RNA
caggtcggtctggagttcctcc

SEQ ID NO: 9379 - RNA, 22 nt, synthetic construct
  source 1..22: mol_type = other RNA
caggtggatggcgacctgcttc

SEQ ID NO: 9380 - RNA, 22 nt, synthetic construct
  source 1..22: mol_type = other RNA
catcacccgcaagaggtacgga

SEQ ID NO: 9381 - RNA, 22 nt, synthetic construct
  source 1..22: mol_type = other RNA
catgaaatcgggcatcacccgc

SEQ ID NO: 9382 - RNA, 22 nt, synthetic construct
  source 1..22: mol_type = other RNA
catgcccaggtcggtctggagt

SEQ ID NO: 9383 - RNA, 22 nt, synthetic construct
  source 1..22: mol_type = other RNA
ccagaccgacctgggcatgaaa

SEQ ID NO: 9384 - RNA, 22 nt, synthetic construct
  source 1..22: mol_type = other RNA
ccaggtcggtctggagttcctc

SEQ ID NO: 9385 - RNA, 22 nt, synthetic construct
  source 1..22: mol_type = other RNA
cccaggtcggtctggagttcct

SEQ ID NO: 9386 - RNA, 22 nt, synthetic construct
  source 1..22: mol_type = other RNA
cccgatttcatgcccaggtcgg

SEQ ID NO: 9387 - RNA, 22 nt, synthetic construct
  source 1..22: mol_type = other RNA
cccgcaagaggtacggagcctc

SEQ ID NO: 9388 - RNA, 22 nt, synthetic construct
  source 1..22: mol_type = other RNA
ccgacctgggcatgaaatcggg

SEQ ID NO: 9389 - RNA, 22 nt, synthetic construct
  source 1..22: mol_type = other RNA
ccgatttcatgcccaggtcggt

SEQ ID NO: 9390 - RNA, 22 nt, synthetic construct
  source 1..22: mol_type = other RNA
ccgcaagaggtacggagcctcc

SEQ ID NO: 9391 - RNA, 22 nt, synthetic construct
  source 1..22: mol_type = other RNA
ccgcagaagcaggtcgccatcc

SEQ ID NO: 9392 - RNA, 22 nt, synthetic construct
  source 1..22: mol_type = other RNA
ccggcgggcaggaggctccgta

SEQ ID NO: 9393 - RNA, 22 nt, synthetic construct
  source 1..22: mol_type = other RNA
ccgtacctcttgcgggtgatgc

SEQ ID NO: 9394 - RNA, 22 nt, synthetic construct
  source 1..22: mol_type = other RNA
ccgtgagccgcagaagcaggtc

SEQ ID NO: 9395 - RNA, 22 nt, synthetic construct
  source 1..22: mol_type = other RNA
cctccgtgagccgcagaagcag

SEQ ID NO: 9396 - RNA, 22 nt, synthetic construct
  source 1..22: mol_type = other RNA
cctcctccgtgagccgcagaag

SEQ ID NO: 9397 - RNA, 22 nt, synthetic construct
  source 1..22: mol_type = other RNA
cctcttgcgggtgatgcccgat

SEQ ID NO: 9398 - RNA, 22 nt, synthetic construct
  source 1..22: mol_type = other RNA
cctgcttctgcggctcacggag

SEQ ID NO: 9399 - RNA, 22 nt, synthetic construct
  source 1..22: mol_type = other RNA
cctgggcatgaaatcgggcatc

SEQ ID NO: 9400 - RNA, 22 nt, synthetic construct
  source 1..22: mol_type = other RNA
cgacctgcttctgcggctcacg

SEQ ID NO: 9401 - RNA, 22 nt, synthetic construct
  source 1..22: mol_type = other RNA
cgacctgggcatgaaatcgggc

SEQ ID NO: 9402 - RNA, 22 nt, synthetic construct
  source 1..22: mol_type = other RNA
cgatttcatgcccaggtcggtc

SEQ ID NO: 9403 - RNA, 22 nt, synthetic construct
  source 1..22: mol_type = other RNA
cgcaagaggtacggagcctcct

SEQ ID NO: 9404 - RNA, 22 nt, synthetic construct
  source 1..22: mol_type = other RNA
cgcagaagcaggtcgccatcca

SEQ ID NO: 9405 - RNA, 22 nt, synthetic construct
  source 1..22: mol_type = other RNA
cggaggaggaactccagaccga

SEQ ID NO: 9406 - RNA, 22 nt, synthetic construct
  source 1..22: mol_type = other RNA
cggcgggcaggaggctccgtac

SEQ ID NO: 9407 - RNA, 22 nt, synthetic construct
  source 1..22: mol_type = other RNA
cggctcacggaggaggaactcc

SEQ ID NO: 9408 - RNA, 22 nt, synthetic construct
  source 1..22: mol_type = other RNA
cgggcaggaggctccgtacctc

SEQ ID NO: 9409 - RNA, 22 nt, synthetic construct
  source 1..22: mol_type = other RNA
cgggcatcacccgcaagaggta

SEQ ID NO: 9410 - RNA, 22 nt, synthetic construct
  source 1..22: mol_type = other RNA
cgggtgatgcccgatttcatgc

SEQ ID NO: 9411 - RNA, 22 nt, synthetic construct
  source 1..22: mol_type = other RNA
cggtctggagttcctcctccgt

SEQ ID NO: 9412 - RNA, 22 nt, synthetic construct
  source 1..22: mol_type = other RNA
cgtacctcttgcgggtgatgcc

SEQ ID NO: 9413 - RNA, 22 nt, synthetic construct
  source 1..22: mol_type = other RNA
cgtgagccgcagaagcaggtcg

SEQ ID NO: 9414 - RNA, 22 nt, synthetic construct
  source 1..22: mol_type = other RNA
ctcacggaggaggaactccaga

SEQ ID NO: 9415 - RNA, 22 nt, synthetic construct
  source 1..22: mol_type = other RNA
ctccagaccgacctgggcatga

SEQ ID NO: 9416 - RNA, 22 nt, synthetic construct
  source 1..22: mol_type = other RNA
ctccgtacctcttgcgggtgat

SEQ ID NO: 9417 - RNA, 22 nt, synthetic construct
  source 1..22: mol_type = other RNA
ctccgtgagccgcagaagcagg

SEQ ID NO: 9418 - RNA, 22 nt, synthetic construct
  source 1..22: mol_type = other RNA
ctcctccgtgagccgcagaagc

SEQ ID NO: 9419 - RNA, 22 nt, synthetic construct
  source 1..22: mol_type = other RNA
ctcttgcgggtgatgcccgatt

SEQ ID NO: 9420 - RNA, 22 nt, synthetic construct
  source 1..22: mol_type = other RNA
ctgcggctcacggaggaggaac

SEQ ID NO: 9421 - RNA, 22 nt, synthetic construct
  source 1..22: mol_type = other RNA
ctgcttctgcggctcacggagg

SEQ ID NO: 9422 - RNA, 22 nt, synthetic construct
  source 1..22: mol_type = other RNA
ctggagttcctcctccgtgagc

SEQ ID NO: 9423 - RNA, 22 nt, synthetic construct
  source 1..22: mol_type = other RNA
ctgggcatgaaatcgggcatca

SEQ ID NO: 9424 - RNA, 22 nt, synthetic construct
  source 1..22: mol_type = other RNA
ctggggtccggcgggcaggagg

SEQ ID NO: 9425 - RNA, 22 nt, synthetic construct
  source 1..22: mol_type = other RNA
cttctgcggctcacggaggagg

SEQ ID NO: 9426 - RNA, 22 nt, synthetic construct
  source 1..22: mol_type = other RNA
cttgcgggtgatgcccgatttc

SEQ ID NO: 9427 - RNA, 22 nt, synthetic construct
  source 1..22: mol_type = other RNA
gaaatcgggcatcacccgcaag

SEQ ID NO: 9428 - RNA, 22 nt, synthetic construct
  source 1..22: mol_type = other RNA
gaactccagaccgacctgggca

SEQ ID NO: 9429 - RNA, 22 nt, synthetic construct
  source 1..22: mol_type = other RNA
gaccgacctgggcatgaaatcg

SEQ ID NO: 9430 - RNA, 22 nt, synthetic construct
  source 1..22: mol_type = other RNA
gacctgcttctgcggctcacgg

SEQ ID NO: 9431 - RNA, 22 nt, synthetic construct
  source 1..22: mol_type = other RNA
gacctgggcatgaaatcgggca

SEQ ID NO: 9432 - RNA, 22 nt, synthetic construct
  source 1..22: mol_type = other RNA
gagcagcaggtggatggcgacc

SEQ ID NO: 9433 - RNA, 22 nt, synthetic construct
  source 1..22: mol_type = other RNA
gagccgcagaagcaggtcgcca

SEQ ID NO: 9434 - RNA, 22 nt, synthetic construct
  source 1..22: mol_type = other RNA
gaggaactccagaccgacctgg

SEQ ID NO: 9435 - RNA, 22 nt, synthetic construct
  source 1..22: mol_type = other RNA
gaggaggaactccagaccgacc

SEQ ID NO: 9436 - RNA, 22 nt, synthetic construct
  source 1..22: mol_type = other RNA
gaggctccgtacctcttgcggg

SEQ ID NO: 9437 - RNA, 22 nt, synthetic construct
  source 1..22: mol_type = other RNA
gaggtacggagcctcctgcccg

SEQ ID NO: 9438 - RNA, 22 nt, synthetic construct
  source 1..22: mol_type = other RNA
gagttcctcctccgtgagccgc

SEQ ID NO: 9439 - RNA, 22 nt, synthetic construct
  source 1..22: mol_type = other RNA
gatgcccgatttcatgcccagg

SEQ ID NO: 9440 - RNA, 22 nt, synthetic construct
  source 1..22: mol_type = other RNA
gatggcgacctgcttctgcggc

SEQ ID NO: 9441 - RNA, 22 nt, synthetic construct
  source 1..22: mol_type = other RNA
gatttcatgcccaggtcggtct

SEQ ID NO: 9442 - RNA, 22 nt, synthetic construct
  source 1..22: mol_type = other RNA
gcaagaggtacggagcctcctg

SEQ ID NO: 9443 - RNA, 22 nt, synthetic construct
  source 1..22: mol_type = other RNA
gcagaagcaggtcgccatccac

SEQ ID NO: 9444 - RNA, 22 nt, synthetic construct
  source 1..22: mol_type = other RNA
gcagcaggtggatggcgacctg

SEQ ID NO: 9445 - RNA, 22 nt, synthetic construct
  source 1..22: mol_type = other RNA
gcaggaggctccgtacctcttg

SEQ ID NO: 9446 - RNA, 22 nt, synthetic construct
  source 1..22: mol_type = other RNA
gcaggtggatggcgacctgctt

SEQ ID NO: 9447 - RNA, 22 nt, synthetic construct
  source 1..22: mol_type = other RNA
gcatcacccgcaagaggtacgg

SEQ ID NO: 9448 - RNA, 22 nt, synthetic construct
  source 1..22: mol_type = other RNA
gcatgaaatcgggcatcacccg

SEQ ID NO: 9449 - RNA, 22 nt, synthetic construct
  source 1..22: mol_type = other RNA
gcccaggtcggtctggagttcc

SEQ ID NO: 9450 - RNA, 22 nt, synthetic construct
  source 1..22: mol_type = other RNA
gcccgatttcatgcccaggtcg

SEQ ID NO: 9451 - RNA, 22 nt, synthetic construct
  source 1..22: mol_type = other RNA
gccgcagaagcaggtcgccatc

SEQ ID NO: 9452 - RNA, 22 nt, synthetic construct
  source 1..22: mol_type = other RNA
gcgacctgcttctgcggctcac

SEQ ID NO: 9453 - RNA, 22 nt, synthetic construct
  source 1..22: mol_type = other RNA
gcggctcacggaggaggaactc

SEQ ID NO: 9454 - RNA, 22 nt, synthetic construct
  source 1..22: mol_type = other RNA
gcgggcaggaggctccgtacct

SEQ ID NO: 9455 - RNA, 22 nt, synthetic construct
  source 1..22: mol_type = other RNA
gcgggtgatgcccgatttcatg

SEQ ID NO: 9456 - RNA, 22 nt, synthetic construct
  source 1..22: mol_type = other RNA
gctcacggaggaggaactccag

SEQ ID NO: 9457 - RNA, 22 nt, synthetic construct
  source 1..22: mol_type = other RNA
gctccgtacctcttgcgggtga

SEQ ID NO: 9458 - RNA, 22 nt, synthetic construct
  source 1..22: mol_type = other RNA
gcttctgcggctcacggaggag

SEQ ID NO: 9459 - RNA, 22 nt, synthetic construct
  source 1..22: mol_type = other RNA
ggaactccagaccgacctgggc

SEQ ID NO: 9460 - RNA, 22 nt, synthetic construct
  source 1..22: mol_type = other RNA
ggaggaactccagaccgacctg

SEQ ID NO: 9461 - RNA, 22 nt, synthetic construct
  source 1..22: mol_type = other RNA
ggaggaggaactccagaccgac

SEQ ID NO: 9462 - RNA, 22 nt, synthetic construct
  source 1..22: mol_type = other RNA
ggaggctccgtacctcttgcgg

SEQ ID NO: 9463 - RNA, 22 nt, synthetic construct
  source 1..22: mol_type = other RNA
ggagttcctcctccgtgagccg

SEQ ID NO: 9464 - RNA, 22 nt, synthetic construct
  source 1..22: mol_type = other RNA
ggatggcgacctgcttctgcgg

SEQ ID NO: 9465 - RNA, 22 nt, synthetic construct
  source 1..22: mol_type = other RNA
ggcaggaggctccgtacctctt

SEQ ID NO: 9466 - RNA, 22 nt, synthetic construct
  source 1..22: mol_type = other RNA
ggcatcacccgcaagaggtacg

SEQ ID NO: 9467 - RNA, 22 nt, synthetic construct
  source 1..22: mol_type = other RNA
ggcatgaaatcgggcatcaccc

SEQ ID NO: 9468 - RNA, 22 nt, synthetic construct
  source 1..22: mol_type = other RNA
ggcgacctgcttctgcggctca

SEQ ID NO: 9469 - RNA, 22 nt, synthetic construct
  source 1..22: mol_type = other RNA
ggcgggcaggaggctccgtacc

SEQ ID NO: 9470 - RNA, 22 nt, synthetic construct
  source 1..22: mol_type = other RNA
ggctcacggaggaggaactcca

SEQ ID NO: 9471 - RNA, 22 nt, synthetic construct
  source 1..22: mol_type = other RNA
ggctccgtacctcttgcgggtg

SEQ ID NO: 9472 - RNA, 22 nt, synthetic construct
  source 1..22: mol_type = other RNA
gggcaggaggctccgtacctct

SEQ ID NO: 9473 - RNA, 22 nt, synthetic construct
  source 1..22: mol_type = other RNA
gggcatcacccgcaagaggtac

SEQ ID NO: 9474 - RNA, 22 nt, synthetic construct
  source 1..22: mol_type = other RNA
gggcatgaaatcgggcatcacc

SEQ ID NO: 9475 - RNA, 22 nt, synthetic construct
  source 1..22: mol_type = other RNA
ggggtccggcgggcaggaggct

SEQ ID NO: 9476 - RNA, 22 nt, synthetic construct
  source 1..22: mol_type = other RNA
gggtccggcgggcaggaggctc

SEQ ID NO: 9477 - RNA, 22 nt, synthetic construct
  source 1..22: mol_type = other RNA
gggtgatgcccgatttcatgcc

SEQ ID NO: 9478 - RNA, 22 nt, synthetic construct
  source 1..22: mol_type = other RNA
ggtacggagcctcctgcccgcc

SEQ ID NO: 9479 - RNA, 22 nt, synthetic construct
  source 1..22: mol_type = other RNA
ggtccggcgggcaggaggctcc

SEQ ID NO: 9480 - RNA, 22 nt, synthetic construct
  source 1..22: mol_type = other RNA
ggtcggtctggagttcctcctc

SEQ ID NO: 9481 - RNA, 22 nt, synthetic construct
  source 1..22: mol_type = other RNA
ggtctggagttcctcctccgtg

SEQ ID NO: 9482 - RNA, 22 nt, synthetic construct
  source 1..22: mol_type = other RNA
ggtgatgcccgatttcatgccc

SEQ ID NO: 9483 - RNA, 22 nt, synthetic construct
  source 1..22: mol_type = other RNA
ggtggatggcgacctgcttctg

SEQ ID NO: 9484 - RNA, 22 nt, synthetic construct
  source 1..22: mol_type = other RNA
gtacctcttgcgggtgatgccc

SEQ ID NO: 9485 - RNA, 22 nt, synthetic construct
  source 1..22: mol_type = other RNA
gtacggagcctcctgcccgccg

SEQ ID NO: 9486 - RNA, 22 nt, synthetic construct
  source 1..22: mol_type = other RNA
gtccggcgggcaggaggctccg

SEQ ID NO: 9487 - RNA, 22 nt, synthetic construct
  source 1..22: mol_type = other RNA
gtcggtctggagttcctcctcc

SEQ ID NO: 9488 - RNA, 22 nt, synthetic construct
  source 1..22: mol_type = other RNA
gtctggagttcctcctccgtga

SEQ ID NO: 9489 - RNA, 22 nt, synthetic construct
  source 1..22: mol_type = other RNA
gtgagccgcagaagcaggtcgc

SEQ ID NO: 9490 - RNA, 22 nt, synthetic construct
  source 1..22: mol_type = other RNA
gtgatgcccgatttcatgccca

SEQ ID NO: 9491 - RNA, 22 nt, synthetic construct
  source 1..22: mol_type = other RNA
gtggatggcgacctgcttctgc

SEQ ID NO: 9492 - RNA, 22 nt, synthetic construct
  source 1..22: mol_type = other RNA
gttcctcctccgtgagccgcag

SEQ ID NO: 9493 - RNA, 22 nt, synthetic construct
  source 1..22: mol_type = other RNA
tacctcttgcgggtgatgcccg

SEQ ID NO: 9494 - RNA, 22 nt, synthetic construct
  source 1..22: mol_type = other RNA
tcacccgcaagaggtacggagc

SEQ ID NO: 9495 - RNA, 22 nt, synthetic construct
  source 1..22: mol_type = other RNA
tcacggaggaggaactccagac

SEQ ID NO: 9496 - RNA, 22 nt, synthetic construct
  source 1..22: mol_type = other RNA
tcatgcccaggtcggtctggag

SEQ ID NO: 9497 - RNA, 22 nt, synthetic construct
  source 1..22: mol_type = other RNA
tccagaccgacctgggcatgaa

SEQ ID NO: 9498 - RNA, 22 nt, synthetic construct
  source 1..22: mol_type = other RNA
tccggcgggcaggaggctccgt

SEQ ID NO: 9499 - RNA, 22 nt, synthetic construct
  source 1..22: mol_type = other RNA
tccgtacctcttgcgggtgatg

SEQ ID NO: 9500 - RNA, 22 nt, synthetic construct
  source 1..22: mol_type = other RNA
tccgtgagccgcagaagcaggt

SEQ ID NO: 9501 - RNA, 22 nt, synthetic construct
  source 1..22: mol_type = other RNA
tcctccgtgagccgcagaagca

SEQ ID NO: 9502 - RNA, 22 nt, synthetic construct
  source 1..22: mol_type = other RNA
tcctcctccgtgagccgcagaa

SEQ ID NO: 9503 - RNA, 22 nt, synthetic construct
  source 1..22: mol_type = other RNA
tcgggcatcacccgcaagaggt

SEQ ID NO: 9504 - RNA, 22 nt, synthetic construct
  source 1..22: mol_type = other RNA
tcggtctggagttcctcctccg

SEQ ID NO: 9505 - RNA, 22 nt, synthetic construct
  source 1..22: mol_type = other RNA
tctgcggctcacggaggaggaa

SEQ ID NO: 9506 - RNA, 22 nt, synthetic construct
  source 1..22: mol_type = other RNA
tctggagttcctcctccgtgag

SEQ ID NO: 9507 - RNA, 22 nt, synthetic construct
  source 1..22: mol_type = other RNA
tcttgcgggtgatgcccgattt

SEQ ID NO: 9508 - RNA, 22 nt, synthetic construct
  source 1..22: mol_type = other RNA
tgaaatcgggcatcacccgcaa

SEQ ID NO: 9509 - RNA, 22 nt, synthetic construct
  source 1..22: mol_type = other RNA
tgagccgcagaagcaggtcgcc

SEQ ID NO: 9510 - RNA, 22 nt, synthetic construct
  source 1..22: mol_type = other RNA
tgatgcccgatttcatgcccag

SEQ ID NO: 9511 - RNA, 22 nt, synthetic construct
  source 1..22: mol_type = other RNA
tgcccaggtcggtctggagttc

SEQ ID NO: 9512 - RNA, 22 nt, synthetic construct
  source 1..22: mol_type = other RNA
tgcccgatttcatgcccaggtc

SEQ ID NO: 9513 - RNA, 22 nt, synthetic construct
  source 1..22: mol_type = other RNA
tgcggctcacggaggaggaact

SEQ ID NO: 9514 - RNA, 22 nt, synthetic construct
  source 1..22: mol_type = other RNA
tgcgggtgatgcccgatttcat

SEQ ID NO: 9515 - RNA, 22 nt, synthetic construct
  source 1..22: mol_type = other RNA
tgcttctgcggctcacggagga

SEQ ID NO: 9516 - RNA, 22 nt, synthetic construct
  source 1..22: mol_type = other RNA
tggagttcctcctccgtgagcc

SEQ ID NO: 9517 - RNA, 22 nt, synthetic construct
  source 1..22: mol_type = other RNA
tggatggcgacctgcttctgcg

SEQ ID NO: 9518 - RNA, 22 nt, synthetic construct
  source 1..22: mol_type = other RNA
tggcgacctgcttctgcggctc

SEQ ID NO: 9519 - RNA, 22 nt, synthetic construct
  source 1..22: mol_type = other RNA
tgggcatgaaatcgggcatcac

SEQ ID NO: 9520 - RNA, 22 nt, synthetic construct
  source 1..22: mol_type = other RNA
tggggtccggcgggcaggaggc

SEQ ID NO: 9521 - RNA, 22 nt, synthetic construct
  source 1..22: mol_type = other RNA
ttcatgcccaggtcggtctgga

SEQ ID NO: 9522 - RNA, 22 nt, synthetic construct
  source 1..22: mol_type = other RNA
ttcctcctccgtgagccgcaga

SEQ ID NO: 9523 - RNA, 22 nt, synthetic construct
  source 1..22: mol_type = other RNA
ttctgcggctcacggaggagga

SEQ ID NO: 9524 - RNA, 22 nt, synthetic construct
  source 1..22: mol_type = other RNA
ttgcgggtgatgcccgatttca

SEQ ID NO: 9525 - RNA, 22 nt, synthetic construct
  source 1..22: mol_type = other RNA
tttcatgcccaggtcggtctgg

SEQ ID NO: 9526 - RNA, 20 nt, synthetic construct
  source 1..20: mol_type = other RNA
aacctggcggactggctggg

SEQ ID NO: 9527 - RNA, 20 nt, synthetic construct
  source 1..20: mol_type = other RNA
aactattctacgtgcgaccg

SEQ ID NO: 9528 - RNA, 20 nt, synthetic construct
  source 1..20: mol_type = other RNA
aagaccttcgccaactattc

SEQ ID NO: 9529 - RNA, 20 nt, synthetic construct
  source 1..20: mol_type = other RNA
aagactgcggcatccacctg

SEQ ID NO: 9530 - RNA, 20 nt, synthetic construct
  source 1..20: mol_type = other RNA
aagcgcgggtccaggctgcc

SEQ ID NO: 9531 - RNA, 20 nt, synthetic construct
  source 1..20: mol_type = other RNA
aaggtcttgagctccgtgag

SEQ ID NO: 9532 - RNA, 20 nt, synthetic construct
  source 1..20: mol_type = other RNA
aatagttggcgaaggtcttg

SEQ ID NO: 9533 - RNA, 20 nt, synthetic construct
  source 1..20: mol_type = other RNA
acacctacggcctggtcagc

SEQ ID NO: 9534 - RNA, 20 nt, synthetic construct
  source 1..20: mol_type = other RNA
acacgcggtgcagcagggag

SEQ ID NO: 9535 - RNA, 20 nt, synthetic construct
  source 1..20: mol_type = other RNA
accaggccgtaggtgtactg

SEQ ID NO: 9536 - RNA, 20 nt, synthetic construct
  source 1..20: mol_type = other RNA
acccgcgcttccgccagtac

SEQ ID NO: 9537 - RNA, 20 nt, synthetic construct
  source 1..20: mol_type = other RNA
accgcagcaacctggcggac

SEQ ID NO: 9538 - RNA, 20 nt, synthetic construct
  source 1..20: mol_type = other RNA
accgcgcccgcatcctcacg

SEQ ID NO: 9539 - RNA, 20 nt, synthetic construct
  source 1..20: mol_type = other RNA
accgcgtgtctgagcagcag

SEQ ID NO: 9540 - RNA, 20 nt, synthetic construct
  source 1..20: mol_type = other RNA
accgctccctgctgcaccgc

SEQ ID NO: 9541 - RNA, 20 nt, synthetic construct
  source 1..20: mol_type = other RNA
acctacggcctggtcagctg

SEQ ID NO: 9542 - RNA, 20 nt, synthetic construct
  source 1..20: mol_type = other RNA
acctctggccgccgtgagga

SEQ ID NO: 9543 - RNA, 20 nt, synthetic construct
  source 1..20: mol_type = other RNA
acctggcggactggctgggc

SEQ ID NO: 9544 - RNA, 20 nt, synthetic construct
  source 1..20: mol_type = other RNA
acctgggcgtgcaccgcgcc

SEQ ID NO: 9545 - RNA, 20 nt, synthetic construct
  source 1..20: mol_type = other RNA
accttcgccaactattctac

SEQ ID NO: 9546 - RNA, 20 nt, synthetic construct
  source 1..20: mol_type = other RNA
acgcccaggtggatgccgca

SEQ ID NO: 9547 - RNA, 20 nt, synthetic construct
  source 1..20: mol_type = other RNA
acgcggtgcagcagggagcg

SEQ ID NO: 9548 - RNA, 20 nt, synthetic construct
  source 1..20: mol_type = other RNA
acggagctcaagaccttcgc

SEQ ID NO: 9549 - RNA, 20 nt, synthetic construct
  source 1..20: mol_type = other RNA
acggcctggtcagctgcggc

SEQ ID NO: 9550 - RNA, 20 nt, synthetic construct
  source 1..20: mol_type = other RNA
acggcggccagaggtcagcc

SEQ ID NO: 9551 - RNA, 20 nt, synthetic construct
  source 1..20: mol_type = other RNA
acgtagaatagttggcgaag

SEQ ID NO: 9552 - RNA, 20 nt, synthetic construct
  source 1..20: mol_type = other RNA
acgtgcgaccgcagcaacct

SEQ ID NO: 9553 - RNA, 20 nt, synthetic construct
  source 1..20: mol_type = other RNA
actattctacgtgcgaccgc

SEQ ID NO: 9554 - RNA, 20 nt, synthetic construct
  source 1..20: mol_type = other RNA
actgcggcatccacctgggc

SEQ ID NO: 9555 - RNA, 20 nt, synthetic construct
  source 1..20: mol_type = other RNA
actggcggaagcgcgggtcc

SEQ ID NO: 9556 - RNA, 20 nt, synthetic construct
  source 1..20: mol_type = other RNA
actggctgggcagcctggac

SEQ ID NO: 9557 - RNA, 20 nt, synthetic construct
  source 1..20: mol_type = other RNA
agaatagttggcgaaggtct

SEQ ID NO: 9558 - RNA, 20 nt, synthetic construct
  source 1..20: mol_type = other RNA
agacacgcggtgcagcaggg

SEQ ID NO: 9559 - RNA, 20 nt, synthetic construct
  source 1..20: mol_type = other RNA
agaccttcgccaactattct

SEQ ID NO: 9560 - RNA, 20 nt, synthetic construct
  source 1..20: mol_type = other RNA
agactgcggcatccacctgg

SEQ ID NO: 9561 - RNA, 20 nt, synthetic construct
  source 1..20: mol_type = other RNA
agaggtcagcccgctcaccc

SEQ ID NO: 9562 - RNA, 20 nt, synthetic construct
  source 1..20: mol_type = other RNA
agcaacctggcggactggct

SEQ ID NO: 9563 - RNA, 20 nt, synthetic construct
  source 1..20: mol_type = other RNA
agcagcagctgctggaagac

SEQ ID NO: 9564 - RNA, 20 nt, synthetic construct
  source 1..20: mol_type = other RNA
agcagctgctgctcagacac

SEQ ID NO: 9565 - RNA, 20 nt, synthetic construct
  source 1..20: mol_type = other RNA
agcagctgctggaagactgc

SEQ ID NO: 9566 - RNA, 20 nt, synthetic construct
  source 1..20: mol_type = other RNA
agcagggagcggtccaggcc

SEQ ID NO: 9567 - RNA, 20 nt, synthetic construct
  source 1..20: mol_type = other RNA
agccagtccgccaggttgct

SEQ ID NO: 9568 - RNA, 20 nt, synthetic construct
  source 1..20: mol_type = other RNA
agcctggacccgcgcttccg

SEQ ID NO: 9569 - RNA, 20 nt, synthetic construct
  source 1..20: mol_type = other RNA
agcgcgggtccaggctgccc

SEQ ID NO: 9570 - RNA, 20 nt, synthetic construct
  source 1..20: mol_type = other RNA
agcgggctgacctctggccg

SEQ ID NO: 9571 - RNA, 20 nt, synthetic construct
  source 1..20: mol_type = other RNA
agcggtccaggccgcagctg

SEQ ID NO: 9572 - RNA, 20 nt, synthetic construct
  source 1..20: mol_type = other RNA
agctcaagaccttcgccaac

SEQ ID NO: 9573 - RNA, 20 nt, synthetic construct
  source 1..20: mol_type = other RNA
agctcacggagctcaagacc

SEQ ID NO: 9574 - RNA, 20 nt, synthetic construct
  source 1..20: mol_type = other RNA
agctgaccaggccgtaggtg

SEQ ID NO: 9575 - RNA, 20 nt, synthetic construct
  source 1..20: mol_type = other RNA
agctgcggcctggaccgctc

SEQ ID NO: 9576 - RNA, 20 nt, synthetic construct
  source 1..20: mol_type = other RNA
agctgctgctcagacacgcg

SEQ ID NO: 9577 - RNA, 20 nt, synthetic construct
  source 1..20: mol_type = other RNA
agctgctggaagactgcggc

SEQ ID NO: 9578 - RNA, 20 nt, synthetic construct
  source 1..20: mol_type = other RNA
aggatgcgggcgcggtgcac

SEQ ID NO: 9579 - RNA, 20 nt, synthetic construct
  source 1..20: mol_type = other RNA
aggccgcagctgaccaggcc

SEQ ID NO: 9580 - RNA, 20 nt, synthetic construct
  source 1..20: mol_type = other RNA
aggccgtaggtgtactggcg

SEQ ID NO: 9581 - RNA, 20 nt, synthetic construct
  source 1..20: mol_type = other RNA
aggctgcccagccagtccgc

SEQ ID NO: 9582 - RNA, 20 nt, synthetic construct
  source 1..20: mol_type = other RNA
agggagcggtccaggccgca

SEQ ID NO: 9583 - RNA, 20 nt, synthetic construct
  source 1..20: mol_type = other RNA
agggagctcacggagctcaa

SEQ ID NO: 9584 - RNA, 20 nt, synthetic construct
  source 1..20: mol_type = other RNA
aggtcagcccgctcacccgg

SEQ ID NO: 9585 - RNA, 20 nt, synthetic construct
  source 1..20: mol_type = other RNA
aggtcttgagctccgtgagc

SEQ ID NO: 9586 - RNA, 20 nt, synthetic construct
  source 1..20: mol_type = other RNA
aggtggatgccgcagtcttc

SEQ ID NO: 9587 - RNA, 20 nt, synthetic construct
  source 1..20: mol_type = other RNA
aggtgtactggcggaagcgc

SEQ ID NO: 9588 - RNA, 20 nt, synthetic construct
  source 1..20: mol_type = other RNA
aggttgctgcggtcgcacgt

SEQ ID NO: 9589 - RNA, 20 nt, synthetic construct
  source 1..20: mol_type = other RNA
agtacacctacggcctggtc

SEQ ID NO: 9590 - RNA, 20 nt, synthetic construct
  source 1..20: mol_type = other RNA
agtccgccaggttgctgcgg

SEQ ID NO: 9591 - RNA, 20 nt, synthetic construct
  source 1..20: mol_type = other RNA
agtcttccagcagctgctgc

SEQ ID NO: 9592 - RNA, 20 nt, synthetic construct
  source 1..20: mol_type = other RNA
agttggcgaaggtcttgagc

SEQ ID NO: 9593 - RNA, 20 nt, synthetic construct
  source 1..20: mol_type = other RNA
atagttggcgaaggtcttga

SEQ ID NO: 9594 - RNA, 20 nt, synthetic construct
  source 1..20: mol_type = other RNA
atccacctgggcgtgcaccg

SEQ ID NO: 9595 - RNA, 20 nt, synthetic construct
  source 1..20: mol_type = other RNA
atcctcacggcggccagagg

SEQ ID NO: 9596 - RNA, 20 nt, synthetic construct
  source 1..20: mol_type = other RNA
atgccgcagtcttccagcag

SEQ ID NO: 9597 - RNA, 20 nt, synthetic construct
  source 1..20: mol_type = other RNA
atgcgggcgcggtgcacgcc

SEQ ID NO: 9598 - RNA, 20 nt, synthetic construct
  source 1..20: mol_type = other RNA
attctacgtgcgaccgcagc

SEQ ID NO: 9599 - RNA, 20 nt, synthetic construct
  source 1..20: mol_type = other RNA
caacctggcggactggctgg

SEQ ID NO: 9600 - RNA, 20 nt, synthetic construct
  source 1..20: mol_type = other RNA
caactattctacgtgcgacc

SEQ ID NO: 9601 - RNA, 20 nt, synthetic construct
  source 1..20: mol_type = other RNA
caagaccttcgccaactatt

SEQ ID NO: 9602 - RNA, 20 nt, synthetic construct
  source 1..20: mol_type = other RNA
caccgcgcccgcatcctcac

SEQ ID NO: 9603 - RNA, 20 nt, synthetic construct
  source 1..20: mol_type = other RNA
caccgcgtgtctgagcagca

SEQ ID NO: 9604 - RNA, 20 nt, synthetic construct
  source 1..20: mol_type = other RNA
cacctacggcctggtcagct

SEQ ID NO: 9605 - RNA, 20 nt, synthetic construct
  source 1..20: mol_type = other RNA
cacctgggcgtgcaccgcgc

SEQ ID NO: 9606 - RNA, 20 nt, synthetic construct
  source 1..20: mol_type = other RNA
cacgcccaggtggatgccgc

SEQ ID NO: 9607 - RNA, 20 nt, synthetic construct
  source 1..20: mol_type = other RNA
cacgcggtgcagcagggagc

SEQ ID NO: 9608 - RNA, 20 nt, synthetic construct
  source 1..20: mol_type = other RNA
cacggagctcaagaccttcg

SEQ ID NO: 9609 - RNA, 20 nt, synthetic construct
  source 1..20: mol_type = other RNA
cacggcggccagaggtcagc

SEQ ID NO: 9610 - RNA, 20 nt, synthetic construct
  source 1..20: mol_type = other RNA
cacgtagaatagttggcgaa

SEQ ID NO: 9611 - RNA, 20 nt, synthetic construct
  source 1..20: mol_type = other RNA
cagacacgcggtgcagcagg

SEQ ID NO: 9612 - RNA, 20 nt, synthetic construct
  source 1..20: mol_type = other RNA
cagaggtcagcccgctcacc

SEQ ID NO: 9613 - RNA, 20 nt, synthetic construct
  source 1..20: mol_type = other RNA
cagcaacctggcggactggc

SEQ ID NO: 9614 - RNA, 20 nt, synthetic construct
  source 1..20: mol_type = other RNA
cagcagctgctgctcagaca

SEQ ID NO: 9615 - RNA, 20 nt, synthetic construct
  source 1..20: mol_type = other RNA
cagcagctgctggaagactg

SEQ ID NO: 9616 - RNA, 20 nt, synthetic construct
  source 1..20: mol_type = other RNA
cagcagggagcggtccaggc

SEQ ID NO: 9617 - RNA, 20 nt, synthetic construct
  source 1..20: mol_type = other RNA
cagccagtccgccaggttgc

SEQ ID NO: 9618 - RNA, 20 nt, synthetic construct
  source 1..20: mol_type = other RNA
cagcctggacccgcgcttcc

SEQ ID NO: 9619 - RNA, 20 nt, synthetic construct
  source 1..20: mol_type = other RNA
cagctgaccaggccgtaggt

SEQ ID NO: 9620 - RNA, 20 nt, synthetic construct
  source 1..20: mol_type = other RNA
cagctgcggcctggaccgct

SEQ ID NO: 9621 - RNA, 20 nt, synthetic construct
  source 1..20: mol_type = other RNA
cagctgctgctcagacacgc

SEQ ID NO: 9622 - RNA, 20 nt, synthetic construct
  source 1..20: mol_type = other RNA
cagctgctggaagactgcgg

SEQ ID NO: 9623 - RNA, 20 nt, synthetic construct
  source 1..20: mol_type = other RNA
caggccgcagctgaccaggc

SEQ ID NO: 9624 - RNA, 20 nt, synthetic construct
  source 1..20: mol_type = other RNA
caggccgtaggtgtactggc

SEQ ID NO: 9625 - RNA, 20 nt, synthetic construct
  source 1..20: mol_type = other RNA
caggctgcccagccagtccg

SEQ ID NO: 9626 - RNA, 20 nt, synthetic construct
  source 1..20: mol_type = other RNA
cagggagcggtccaggccgc

SEQ ID NO: 9627 - RNA, 20 nt, synthetic construct
  source 1..20: mol_type = other RNA
caggtggatgccgcagtctt

SEQ ID NO: 9628 - RNA, 20 nt, synthetic construct
  source 1..20: mol_type = other RNA
caggttgctgcggtcgcacg

SEQ ID NO: 9629 - RNA, 20 nt, synthetic construct
  source 1..20: mol_type = other RNA
cagtacacctacggcctggt

SEQ ID NO: 9630 - RNA, 20 nt, synthetic construct
  source 1..20: mol_type = other RNA
cagtccgccaggttgctgcg

SEQ ID NO: 9631 - RNA, 20 nt, synthetic construct
  source 1..20: mol_type = other RNA
cagtcttccagcagctgctg

SEQ ID NO: 9632 - RNA, 20 nt, synthetic construct
  source 1..20: mol_type = other RNA
catccacctgggcgtgcacc

SEQ ID NO: 9633 - RNA, 20 nt, synthetic construct
  source 1..20: mol_type = other RNA
catcctcacggcggccagag

SEQ ID NO: 9634 - RNA, 20 nt, synthetic construct
  source 1..20: mol_type = other RNA
ccaactattctacgtgcgac

SEQ ID NO: 9635 - RNA, 20 nt, synthetic construct
  source 1..20: mol_type = other RNA
ccacctgggcgtgcaccgcg

SEQ ID NO: 9636 - RNA, 20 nt, synthetic construct
  source 1..20: mol_type = other RNA
ccagaggtcagcccgctcac

SEQ ID NO: 9637 - RNA, 20 nt, synthetic construct
  source 1..20: mol_type = other RNA
ccagcagctgctgctcagac

SEQ ID NO: 9638 - RNA, 20 nt, synthetic construct
  source 1..20: mol_type = other RNA
ccagccagtccgccaggttg

SEQ ID NO: 9639 - RNA, 20 nt, synthetic construct
  source 1..20: mol_type = other RNA
ccaggccgcagctgaccagg

SEQ ID NO: 9640 - RNA, 20 nt, synthetic construct
  source 1..20: mol_type = other RNA
ccaggccgtaggtgtactgg

SEQ ID NO: 9641 - RNA, 20 nt, synthetic construct
  source 1..20: mol_type = other RNA
ccaggctgcccagccagtcc

SEQ ID NO: 9642 - RNA, 20 nt, synthetic construct
  source 1..20: mol_type = other RNA
ccaggtggatgccgcagtct

SEQ ID NO: 9643 - RNA, 20 nt, synthetic construct
  source 1..20: mol_type = other RNA
ccaggttgctgcggtcgcac

SEQ ID NO: 9644 - RNA, 20 nt, synthetic construct
  source 1..20: mol_type = other RNA
ccagtacacctacggcctgg

SEQ ID NO: 9645 - RNA, 20 nt, synthetic construct
  source 1..20: mol_type = other RNA
ccagtccgccaggttgctgc

SEQ ID NO: 9646 - RNA, 20 nt, synthetic construct
  source 1..20: mol_type = other RNA
cccagccagtccgccaggtt

SEQ ID NO: 9647 - RNA, 20 nt, synthetic construct
  source 1..20: mol_type = other RNA
cccaggtggatgccgcagtc

SEQ ID NO: 9648 - RNA, 20 nt, synthetic construct
  source 1..20: mol_type = other RNA
cccgcatcctcacggcggcc

SEQ ID NO: 9649 - RNA, 20 nt, synthetic construct
  source 1..20: mol_type = other RNA
cccgcgcttccgccagtaca

SEQ ID NO: 9650 - RNA, 20 nt, synthetic construct
  source 1..20: mol_type = other RNA
cccgggtgagcgggctgacc

SEQ ID NO: 9651 - RNA, 20 nt, synthetic construct
  source 1..20: mol_type = other RNA
ccctgctgcaccgcgtgtct

SEQ ID NO: 9652 - RNA, 20 nt, synthetic construct
  source 1..20: mol_type = other RNA
ccgcagcaacctggcggact

SEQ ID NO: 9653 - RNA, 20 nt, synthetic construct
  source 1..20: mol_type = other RNA
ccgcagctgaccaggccgta

SEQ ID NO: 9654 - RNA, 20 nt, synthetic construct
  source 1..20: mol_type = other RNA
ccgcagtcttccagcagctg

SEQ ID NO: 9655 - RNA, 20 nt, synthetic construct
  source 1..20: mol_type = other RNA
ccgcatcctcacggcggcca

SEQ ID NO: 9656 - RNA, 20 nt, synthetic construct
  source 1..20: mol_type = other RNA
ccgccaggttgctgcggtcg

SEQ ID NO: 9657 - RNA, 20 nt, synthetic construct
  source 1..20: mol_type = other RNA
ccgccagtacacctacggcc

SEQ ID NO: 9658 - RNA, 20 nt, synthetic construct
  source 1..20: mol_type = other RNA
ccgccgtgaggatgcgggcg

SEQ ID NO: 9659 - RNA, 20 nt, synthetic construct
  source 1..20: mol_type = other RNA
ccgcgcccgcatcctcacgg

SEQ ID NO: 9660 - RNA, 20 nt, synthetic construct
  source 1..20: mol_type = other RNA
ccgcgcttccgccagtacac

SEQ ID NO: 9661 - RNA, 20 nt, synthetic construct
  source 1..20: mol_type = other RNA
ccgcgtgtctgagcagcagc

SEQ ID NO: 9662 - RNA, 20 nt, synthetic construct
  source 1..20: mol_type = other RNA
ccgctccctgctgcaccgcg

SEQ ID NO: 9663 - RNA, 20 nt, synthetic construct
  source 1..20: mol_type = other RNA
ccgggtgagcgggctgacct

SEQ ID NO: 9664 - RNA, 20 nt, synthetic construct
  source 1..20: mol_type = other RNA
ccgtaggtgtactggcggaa

SEQ ID NO: 9665 - RNA, 20 nt, synthetic construct
  source 1..20: mol_type = other RNA
ccgtgaggatgcgggcgcgg

SEQ ID NO: 9666 - RNA, 20 nt, synthetic construct
  source 1..20: mol_type = other RNA
cctacggcctggtcagctgc

SEQ ID NO: 9667 - RNA, 20 nt, synthetic construct
  source 1..20: mol_type = other RNA
cctcacggcggccagaggtc

SEQ ID NO: 9668 - RNA, 20 nt, synthetic construct
  source 1..20: mol_type = other RNA
cctctggccgccgtgaggat

SEQ ID NO: 9669 - RNA, 20 nt, synthetic construct
  source 1..20: mol_type = other RNA
cctgctgcaccgcgtgtctg

SEQ ID NO: 9670 - RNA, 20 nt, synthetic construct
  source 1..20: mol_type = other RNA
cctggacccgcgcttccgcc

SEQ ID NO: 9671 - RNA, 20 nt, synthetic construct
  source 1..20: mol_type = other RNA
cctggaccgctccctgctgc

SEQ ID NO: 9672 - RNA, 20 nt, synthetic construct
  source 1..20: mol_type = other RNA
cctggcggactggctgggca

SEQ ID NO: 9673 - RNA, 20 nt, synthetic construct
  source 1..20: mol_type = other RNA
cctgggcgtgcaccgcgccc

SEQ ID NO: 9674 - RNA, 20 nt, synthetic construct
  source 1..20: mol_type = other RNA
cctggtcagctgcggcctgg

SEQ ID NO: 9675 - RNA, 20 nt, synthetic construct
  source 1..20: mol_type = other RNA
ccttcgccaactattctacg

SEQ ID NO: 9676 - RNA, 20 nt, synthetic construct
  source 1..20: mol_type = other RNA
cgaaggtcttgagctccgtg

SEQ ID NO: 9677 - RNA, 20 nt, synthetic construct
  source 1..20: mol_type = other RNA
cgaccgcagcaacctggcgg

SEQ ID NO: 9678 - RNA, 20 nt, synthetic construct
  source 1..20: mol_type = other RNA
cgcacgtagaatagttggcg

SEQ ID NO: 9679 - RNA, 20 nt, synthetic construct
  source 1..20: mol_type = other RNA
cgcagcaacctggcggactg

SEQ ID NO: 9680 - RNA, 20 nt, synthetic construct
  source 1..20: mol_type = other RNA
cgcagctgaccaggccgtag

SEQ ID NO: 9681 - RNA, 20 nt, synthetic construct
  source 1..20: mol_type = other RNA
cgcagtcttccagcagctgc

SEQ ID NO: 9682 - RNA, 20 nt, synthetic construct
  source 1..20: mol_type = other RNA
cgcatcctcacggcggccag

SEQ ID NO: 9683 - RNA, 20 nt, synthetic construct
  source 1..20: mol_type = other RNA
cgccaactattctacgtgcg

SEQ ID NO: 9684 - RNA, 20 nt, synthetic construct
  source 1..20: mol_type = other RNA
cgccaggttgctgcggtcgc

SEQ ID NO: 9685 - RNA, 20 nt, synthetic construct
  source 1..20: mol_type = other RNA
cgccagtacacctacggcct

SEQ ID NO: 9686 - RNA, 20 nt, synthetic construct
  source 1..20: mol_type = other RNA
cgcccaggtggatgccgcag

SEQ ID NO: 9687 - RNA, 20 nt, synthetic construct
  source 1..20: mol_type = other RNA
cgcccgcatcctcacggcgg

SEQ ID NO: 9688 - RNA, 20 nt, synthetic construct
  source 1..20: mol_type = other RNA
cgccgtgaggatgcgggcgc

SEQ ID NO: 9689 - RNA, 20 nt, synthetic construct
  source 1..20: mol_type = other RNA
cgcgcccgcatcctcacggc

SEQ ID NO: 9690 - RNA, 20 nt, synthetic construct
  source 1..20: mol_type = other RNA
cgcgcttccgccagtacacc

SEQ ID NO: 9691 - RNA, 20 nt, synthetic construct
  source 1..20: mol_type = other RNA
cgcgggtccaggctgcccag

SEQ ID NO: 9692 - RNA, 20 nt, synthetic construct
  source 1..20: mol_type = other RNA
cgcggtgcacgcccaggtgg

SEQ ID NO: 9693 - RNA, 20 nt, synthetic construct
  source 1..20: mol_type = other RNA
cgcggtgcagcagggagcgg

SEQ ID NO: 9694 - RNA, 20 nt, synthetic construct
  source 1..20: mol_type = other RNA
cgcgtgtctgagcagcagct

SEQ ID NO: 9695 - RNA, 20 nt, synthetic construct
  source 1..20: mol_type = other RNA
cgctccctgctgcaccgcgt

SEQ ID NO: 9696 - RNA, 20 nt, synthetic construct
  source 1..20: mol_type = other RNA
cgcttccgccagtacaccta

SEQ ID NO: 9697 - RNA, 20 nt, synthetic construct
  source 1..20: mol_type = other RNA
cggaagcgcgggtccaggct

SEQ ID NO: 9698 - RNA, 20 nt, synthetic construct
  source 1..20: mol_type = other RNA
cggactggctgggcagcctg

SEQ ID NO: 9699 - RNA, 20 nt, synthetic construct
  source 1..20: mol_type = other RNA
cggagctcaagaccttcgcc

SEQ ID NO: 9700 - RNA, 20 nt, synthetic construct
  source 1..20: mol_type = other RNA
cggcatccacctgggcgtgc

SEQ ID NO: 9701 - RNA, 20 nt, synthetic construct
  source 1..20: mol_type = other RNA
cggccagaggtcagcccgct

SEQ ID NO: 9702 - RNA, 20 nt, synthetic construct
  source 1..20: mol_type = other RNA
cggcctggaccgctccctgc

SEQ ID NO: 9703 - RNA, 20 nt, synthetic construct
  source 1..20: mol_type = other RNA
cggcctggtcagctgcggcc

SEQ ID NO: 9704 - RNA, 20 nt, synthetic construct
  source 1..20: mol_type = other RNA
cggcggccagaggtcagccc

SEQ ID NO: 9705 - RNA, 20 nt, synthetic construct
  source 1..20: mol_type = other RNA
cgggcgcggtgcacgcccag

SEQ ID NO: 9706 - RNA, 20 nt, synthetic construct
  source 1..20: mol_type = other RNA
cgggctgacctctggccgcc

SEQ ID NO: 9707 - RNA, 20 nt, synthetic construct
  source 1..20: mol_type = other RNA
cggggtcccgggtgagcggg

SEQ ID NO: 9708 - RNA, 20 nt, synthetic construct
  source 1..20: mol_type = other RNA
cgggtccaggctgcccagcc

SEQ ID NO: 9709 - RNA, 20 nt, synthetic construct
  source 1..20: mol_type = other RNA
cgggtgagcgggctgacctc

SEQ ID NO: 9710 - RNA, 20 nt, synthetic construct
  source 1..20: mol_type = other RNA
cggtccaggccgcagctgac

SEQ ID NO: 9711 - RNA, 20 nt, synthetic construct
  source 1..20: mol_type = other RNA
cggtcgcacgtagaatagtt

SEQ ID NO: 9712 - RNA, 20 nt, synthetic construct
  source 1..20: mol_type = other RNA
cggtgcacgcccaggtggat

SEQ ID NO: 9713 - RNA, 20 nt, synthetic construct
  source 1..20: mol_type = other RNA
cggtgcagcagggagcggtc

SEQ ID NO: 9714 - RNA, 20 nt, synthetic construct
  source 1..20: mol_type = other RNA
cgtagaatagttggcgaagg

SEQ ID NO: 9715 - RNA, 20 nt, synthetic construct
  source 1..20: mol_type = other RNA
cgtaggtgtactggcggaag

SEQ ID NO: 9716 - RNA, 20 nt, synthetic construct
  source 1..20: mol_type = other RNA
cgtgaggatgcgggcgcggt

SEQ ID NO: 9717 - RNA, 20 nt, synthetic construct
  source 1..20: mol_type = other RNA
cgtgcaccgcgcccgcatcc

SEQ ID NO: 9718 - RNA, 20 nt, synthetic construct
  source 1..20: mol_type = other RNA
cgtgcgaccgcagcaacctg

SEQ ID NO: 9719 - RNA, 20 nt, synthetic construct
  source 1..20: mol_type = other RNA
cgtgtctgagcagcagctgc

SEQ ID NO: 9720 - RNA, 20 nt, synthetic construct
  source 1..20: mol_type = other RNA
ctacggcctggtcagctgcg

SEQ ID NO: 9721 - RNA, 20 nt, synthetic construct
  source 1..20: mol_type = other RNA
ctacgtgcgaccgcagcaac

SEQ ID NO: 9722 - RNA, 20 nt, synthetic construct
  source 1..20: mol_type = other RNA
ctattctacgtgcgaccgca

SEQ ID NO: 9723 - RNA, 20 nt, synthetic construct
  source 1..20: mol_type = other RNA
ctcaagaccttcgccaacta

SEQ ID NO: 9724 - RNA, 20 nt, synthetic construct
  source 1..20: mol_type = other RNA
ctcacggagctcaagacctt

SEQ ID NO: 9725 - RNA, 20 nt, synthetic construct
  source 1..20: mol_type = other RNA
ctcacggcggccagaggtca

SEQ ID NO: 9726 - RNA, 20 nt, synthetic construct
  source 1..20: mol_type = other RNA
ctcagacacgcggtgcagca

SEQ ID NO: 9727 - RNA, 20 nt, synthetic construct
  source 1..20: mol_type = other RNA
ctccctgctgcaccgcgtgt

SEQ ID NO: 9728 - RNA, 20 nt, synthetic construct
  source 1..20: mol_type = other RNA
ctctggccgccgtgaggatg

SEQ ID NO: 9729 - RNA, 20 nt, synthetic construct
  source 1..20: mol_type = other RNA
ctgaccaggccgtaggtgta

SEQ ID NO: 9730 - RNA, 20 nt, synthetic construct
  source 1..20: mol_type = other RNA
ctgacctctggccgccgtga

SEQ ID NO: 9731 - RNA, 20 nt, synthetic construct
  source 1..20: mol_type = other RNA
ctgagcagcagctgctggaa

SEQ ID NO: 9732 - RNA, 20 nt, synthetic construct
  source 1..20: mol_type = other RNA
ctgcaccgcgtgtctgagca

SEQ ID NO: 9733 - RNA, 20 nt, synthetic construct
  source 1..20: mol_type = other RNA
ctgcccagccagtccgccag

SEQ ID NO: 9734 - RNA, 20 nt, synthetic construct
  source 1..20: mol_type = other RNA
ctgcggcatccacctgggcg

SEQ ID NO: 9735 - RNA, 20 nt, synthetic construct
  source 1..20: mol_type = other RNA
ctgcggcctggaccgctccc

SEQ ID NO: 9736 - RNA, 20 nt, synthetic construct
  source 1..20: mol_type = other RNA
ctgcggtcgcacgtagaata

SEQ ID NO: 9737 - RNA, 20 nt, synthetic construct
  source 1..20: mol_type = other RNA
ctgctcagacacgcggtgca

SEQ ID NO: 9738 - RNA, 20 nt, synthetic construct
  source 1..20: mol_type = other RNA
ctgctgcaccgcgtgtctga

SEQ ID NO: 9739 - RNA, 20 nt, synthetic construct
  source 1..20: mol_type = other RNA
ctgctgctcagacacgcggt

SEQ ID NO: 9740 - RNA, 20 nt, synthetic construct
  source 1..20: mol_type = other RNA
ctgctggaagactgcggcat

SEQ ID NO: 9741 - RNA, 20 nt, synthetic construct
  source 1..20: mol_type = other RNA
ctggaagactgcggcatcca

SEQ ID NO: 9742 - RNA, 20 nt, synthetic construct
  source 1..20: mol_type = other RNA
ctggacccgcgcttccgcca

SEQ ID NO: 9743 - RNA, 20 nt, synthetic construct
  source 1..20: mol_type = other RNA
ctggaccgctccctgctgca

SEQ ID NO: 9744 - RNA, 20 nt, synthetic construct
  source 1..20: mol_type = other RNA
ctggccgccgtgaggatgcg

SEQ ID NO: 9745 - RNA, 20 nt, synthetic construct
  source 1..20: mol_type = other RNA
ctggcggaagcgcgggtcca

SEQ ID NO: 9746 - RNA, 20 nt, synthetic construct
  source 1..20: mol_type = other RNA
ctggcggactggctgggcag

SEQ ID NO: 9747 - RNA, 20 nt, synthetic construct
  source 1..20: mol_type = other RNA
ctggctgggcagcctggacc

SEQ ID NO: 9748 - RNA, 20 nt, synthetic construct
  source 1..20: mol_type = other RNA
ctgggcagcctggacccgcg

SEQ ID NO: 9749 - RNA, 20 nt, synthetic construct
  source 1..20: mol_type = other RNA
ctgggcgtgcaccgcgcccg

SEQ ID NO: 9750 - RNA, 20 nt, synthetic construct
  source 1..20: mol_type = other RNA
ctggtcagctgcggcctgga

SEQ ID NO: 9751 - RNA, 20 nt, synthetic construct
  source 1..20: mol_type = other RNA
cttccagcagctgctgctca

SEQ ID NO: 9752 - RNA, 20 nt, synthetic construct
  source 1..20: mol_type = other RNA
cttccgccagtacacctacg

SEQ ID NO: 9753 - RNA, 20 nt, synthetic construct
  source 1..20: mol_type = other RNA
cttcgccaactattctacgt

SEQ ID NO: 9754 - RNA, 20 nt, synthetic construct
  source 1..20: mol_type = other RNA
cttgagctccgtgagctccc

SEQ ID NO: 9755 - RNA, 20 nt, synthetic construct
  source 1..20: mol_type = other RNA
ctttagggagctcacggagc

SEQ ID NO: 9756 - RNA, 20 nt, synthetic construct
  source 1..20: mol_type = other RNA
gaagactgcggcatccacct

SEQ ID NO: 9757 - RNA, 20 nt, synthetic construct
  source 1..20: mol_type = other RNA
gaagcgcgggtccaggctgc

SEQ ID NO: 9758 - RNA, 20 nt, synthetic construct
  source 1..20: mol_type = other RNA
gaaggtcttgagctccgtga

SEQ ID NO: 9759 - RNA, 20 nt, synthetic construct
  source 1..20: mol_type = other RNA
gaatagttggcgaaggtctt

SEQ ID NO: 9760 - RNA, 20 nt, synthetic construct
  source 1..20: mol_type = other RNA
gacacgcggtgcagcaggga

SEQ ID NO: 9761 - RNA, 20 nt, synthetic construct
  source 1..20: mol_type = other RNA
gaccaggccgtaggtgtact

SEQ ID NO: 9762 - RNA, 20 nt, synthetic construct
  source 1..20: mol_type = other RNA
gacccgcgcttccgccagta

SEQ ID NO: 9763 - RNA, 20 nt, synthetic construct
  source 1..20: mol_type = other RNA
gaccgcagcaacctggcgga

SEQ ID NO: 9764 - RNA, 20 nt, synthetic construct
  source 1..20: mol_type = other RNA
gaccgctccctgctgcaccg

SEQ ID NO: 9765 - RNA, 20 nt, synthetic construct
  source 1..20: mol_type = other RNA
gacctctggccgccgtgagg

SEQ ID NO: 9766 - RNA, 20 nt, synthetic construct
  source 1..20: mol_type = other RNA
gaccttcgccaactattcta

SEQ ID NO: 9767 - RNA, 20 nt, synthetic construct
  source 1..20: mol_type = other RNA
gactgcggcatccacctggg

SEQ ID NO: 9768 - RNA, 20 nt, synthetic construct
  source 1..20: mol_type = other RNA
gactggctgggcagcctgga

SEQ ID NO: 9769 - RNA, 20 nt, synthetic construct
  source 1..20: mol_type = other RNA
gagcagcagctgctggaaga

SEQ ID NO: 9770 - RNA, 20 nt, synthetic construct
  source 1..20: mol_type = other RNA
gagcgggctgacctctggcc

SEQ ID NO: 9771 - RNA, 20 nt, synthetic construct
  source 1..20: mol_type = other RNA
gagcggtccaggccgcagct

SEQ ID NO: 9772 - RNA, 20 nt, synthetic construct
  source 1..20: mol_type = other RNA
gagctcaagaccttcgccaa

SEQ ID NO: 9773 - RNA, 20 nt, synthetic construct
  source 1..20: mol_type = other RNA
gagctcacggagctcaagac

SEQ ID NO: 9774 - RNA, 20 nt, synthetic construct
  source 1..20: mol_type = other RNA
gaggatgcgggcgcggtgca

SEQ ID NO: 9775 - RNA, 20 nt, synthetic construct
  source 1..20: mol_type = other RNA
gaggtcagcccgctcacccg

SEQ ID NO: 9776 - RNA, 20 nt, synthetic construct
  source 1..20: mol_type = other RNA
gatgccgcagtcttccagca

SEQ ID NO: 9777 - RNA, 20 nt, synthetic construct
  source 1..20: mol_type = other RNA
gatgcgggcgcggtgcacgc

SEQ ID NO: 9778 - RNA, 20 nt, synthetic construct
  source 1..20: mol_type = other RNA
gcaacctggcggactggctg

SEQ ID NO: 9779 - RNA, 20 nt, synthetic construct
  source 1..20: mol_type = other RNA
gcaccgcgcccgcatcctca

SEQ ID NO: 9780 - RNA, 20 nt, synthetic construct
  source 1..20: mol_type = other RNA
gcaccgcgtgtctgagcagc

SEQ ID NO: 9781 - RNA, 20 nt, synthetic construct
  source 1..20: mol_type = other RNA
gcacgcccaggtggatgccg

SEQ ID NO: 9782 - RNA, 20 nt, synthetic construct
  source 1..20: mol_type = other RNA
gcacgtagaatagttggcga

SEQ ID NO: 9783 - RNA, 20 nt, synthetic construct
  source 1..20: mol_type = other RNA
gcagcaacctggcggactgg

SEQ ID NO: 9784 - RNA, 20 nt, synthetic construct
  source 1..20: mol_type = other RNA
gcagcagctgctggaagact

SEQ ID NO: 9785 - RNA, 20 nt, synthetic construct
  source 1..20: mol_type = other RNA
gcagcagggagcggtccagg

SEQ ID NO: 9786 - RNA, 20 nt, synthetic construct
  source 1..20: mol_type = other RNA
gcagcctggacccgcgcttc

SEQ ID NO: 9787 - RNA, 20 nt, synthetic construct
  source 1..20: mol_type = other RNA
gcagctgaccaggccgtagg

SEQ ID NO: 9788 - RNA, 20 nt, synthetic construct
  source 1..20: mol_type = other RNA
gcagctgctgctcagacacg

SEQ ID NO: 9789 - RNA, 20 nt, synthetic construct
  source 1..20: mol_type = other RNA
gcagctgctggaagactgcg

SEQ ID NO: 9790 - RNA, 20 nt, synthetic construct
  source 1..20: mol_type = other RNA
gcagggagcggtccaggccg

SEQ ID NO: 9791 - RNA, 20 nt, synthetic construct
  source 1..20: mol_type = other RNA
gcagtcttccagcagctgct

SEQ ID NO: 9792 - RNA, 20 nt, synthetic construct
  source 1..20: mol_type = other RNA
gcatccacctgggcgtgcac

SEQ ID NO: 9793 - RNA, 20 nt, synthetic construct
  source 1..20: mol_type = other RNA
gcatcctcacggcggccaga

SEQ ID NO: 9794 - RNA, 20 nt, synthetic construct
  source 1..20: mol_type = other RNA
gccaactattctacgtgcga

SEQ ID NO: 9795 - RNA, 20 nt, synthetic construct
  source 1..20: mol_type = other RNA
gccagaggtcagcccgctca

SEQ ID NO: 9796 - RNA, 20 nt, synthetic construct
  source 1..20: mol_type = other RNA
gccaggttgctgcggtcgca

SEQ ID NO: 9797 - RNA, 20 nt, synthetic construct
  source 1..20: mol_type = other RNA
gccagtacacctacggcctg

SEQ ID NO: 9798 - RNA, 20 nt, synthetic construct
  source 1..20: mol_type = other RNA
gccagtccgccaggttgctg

SEQ ID NO: 9799 - RNA, 20 nt, synthetic construct
  source 1..20: mol_type = other RNA
gcccagccagtccgccaggt

SEQ ID NO: 9800 - RNA, 20 nt, synthetic construct
  source 1..20: mol_type = other RNA
gcccaggtggatgccgcagt

SEQ ID NO: 9801 - RNA, 20 nt, synthetic construct
  source 1..20: mol_type = other RNA
gcccgcatcctcacggcggc

SEQ ID NO: 9802 - RNA, 20 nt, synthetic construct
  source 1..20: mol_type = other RNA
gccgcagctgaccaggccgt

SEQ ID NO: 9803 - RNA, 20 nt, synthetic construct
  source 1..20: mol_type = other RNA
gccgcagtcttccagcagct

SEQ ID NO: 9804 - RNA, 20 nt, synthetic construct
  source 1..20: mol_type = other RNA
gccgccgtgaggatgcgggc

SEQ ID NO: 9805 - RNA, 20 nt, synthetic construct
  source 1..20: mol_type = other RNA
gccgtaggtgtactggcgga

SEQ ID NO: 9806 - RNA, 20 nt, synthetic construct
  source 1..20: mol_type = other RNA
gccgtgaggatgcgggcgcg

SEQ ID NO: 9807 - RNA, 20 nt, synthetic construct
  source 1..20: mol_type = other RNA
gcctggacccgcgcttccgc

SEQ ID NO: 9808 - RNA, 20 nt, synthetic construct
  source 1..20: mol_type = other RNA
gcctggaccgctccctgctg

SEQ ID NO: 9809 - RNA, 20 nt, synthetic construct
  source 1..20: mol_type = other RNA
gcctggtcagctgcggcctg

SEQ ID NO: 9810 - RNA, 20 nt, synthetic construct
  source 1..20: mol_type = other RNA
gcgaaggtcttgagctccgt

SEQ ID NO: 9811 - RNA, 20 nt, synthetic construct
  source 1..20: mol_type = other RNA
gcgaccgcagcaacctggcg

SEQ ID NO: 9812 - RNA, 20 nt, synthetic construct
  source 1..20: mol_type = other RNA
gcgcccgcatcctcacggcg

SEQ ID NO: 9813 - RNA, 20 nt, synthetic construct
  source 1..20: mol_type = other RNA
gcgcgggtccaggctgccca

SEQ ID NO: 9814 - RNA, 20 nt, synthetic construct
  source 1..20: mol_type = other RNA
gcgcggtgcacgcccaggtg

SEQ ID NO: 9815 - RNA, 20 nt, synthetic construct
  source 1..20: mol_type = other RNA
gcgcttccgccagtacacct

SEQ ID NO: 9816 - RNA, 20 nt, synthetic construct
  source 1..20: mol_type = other RNA
gcggaagcgcgggtccaggc

SEQ ID NO: 9817 - RNA, 20 nt, synthetic construct
  source 1..20: mol_type = other RNA
gcggactggctgggcagcct

SEQ ID NO: 9818 - RNA, 20 nt, synthetic construct
  source 1..20: mol_type = other RNA
gcggcatccacctgggcgtg

SEQ ID NO: 9819 - RNA, 20 nt, synthetic construct
  source 1..20: mol_type = other RNA
gcggccagaggtcagcccgc

SEQ ID NO: 9820 - RNA, 20 nt, synthetic construct
  source 1..20: mol_type = other RNA
gcggcctggaccgctccctg

SEQ ID NO: 9821 - RNA, 20 nt, synthetic construct
  source 1..20: mol_type = other RNA
gcgggcgcggtgcacgccca

SEQ ID NO: 9822 - RNA, 20 nt, synthetic construct
  source 1..20: mol_type = other RNA
gcgggctgacctctggccgc

SEQ ID NO: 9823 - RNA, 20 nt, synthetic construct
  source 1..20: mol_type = other RNA
gcggggtcccgggtgagcgg

SEQ ID NO: 9824 - RNA, 20 nt, synthetic construct
  source 1..20: mol_type = other RNA
gcgggtccaggctgcccagc

SEQ ID NO: 9825 - RNA, 20 nt, synthetic construct
  source 1..20: mol_type = other RNA
gcggtccaggccgcagctga

SEQ ID NO: 9826 - RNA, 20 nt, synthetic construct
  source 1..20: mol_type = other RNA
gcggtcgcacgtagaatagt

SEQ ID NO: 9827 - RNA, 20 nt, synthetic construct
  source 1..20: mol_type = other RNA
gcggtgcacgcccaggtgga

SEQ ID NO: 9828 - RNA, 20 nt, synthetic construct
  source 1..20: mol_type = other RNA
gcggtgcagcagggagcggt

SEQ ID NO: 9829 - RNA, 20 nt, synthetic construct
  source 1..20: mol_type = other RNA
gcgtgcaccgcgcccgcatc

SEQ ID NO: 9830 - RNA, 20 nt, synthetic construct
  source 1..20: mol_type = other RNA
gcgtgtctgagcagcagctg

SEQ ID NO: 9831 - RNA, 20 nt, synthetic construct
  source 1..20: mol_type = other RNA
gctcaagaccttcgccaact

SEQ ID NO: 9832 - RNA, 20 nt, synthetic construct
  source 1..20: mol_type = other RNA
gctcacggagctcaagacct

SEQ ID NO: 9833 - RNA, 20 nt, synthetic construct
  source 1..20: mol_type = other RNA
gctcagacacgcggtgcagc

SEQ ID NO: 9834 - RNA, 20 nt, synthetic construct
  source 1..20: mol_type = other RNA
gctccctgctgcaccgcgtg

SEQ ID NO: 9835 - RNA, 20 nt, synthetic construct
  source 1..20: mol_type = other RNA
gctgaccaggccgtaggtgt

SEQ ID NO: 9836 - RNA, 20 nt, synthetic construct
  source 1..20: mol_type = other RNA
gctgacctctggccgccgtg

SEQ ID NO: 9837 - RNA, 20 nt, synthetic construct
  source 1..20: mol_type = other RNA
gctgcaccgcgtgtctgagc

SEQ ID NO: 9838 - RNA, 20 nt, synthetic construct
  source 1..20: mol_type = other RNA
gctgcccagccagtccgcca

SEQ ID NO: 9839 - RNA, 20 nt, synthetic construct
  source 1..20: mol_type = other RNA
gctgcggcctggaccgctcc

SEQ ID NO: 9840 - RNA, 20 nt, synthetic construct
  source 1..20: mol_type = other RNA
gctgcggtcgcacgtagaat

SEQ ID NO: 9841 - RNA, 20 nt, synthetic construct
  source 1..20: mol_type = other RNA
gctgctcagacacgcggtgc

SEQ ID NO: 9842 - RNA, 20 nt, synthetic construct
  source 1..20: mol_type = other RNA
gctgctgctcagacacgcgg

SEQ ID NO: 9843 - RNA, 20 nt, synthetic construct
  source 1..20: mol_type = other RNA
gctgctggaagactgcggca

SEQ ID NO: 9844 - RNA, 20 nt, synthetic construct
  source 1..20: mol_type = other RNA
gctggaagactgcggcatcc

SEQ ID NO: 9845 - RNA, 20 nt, synthetic construct
  source 1..20: mol_type = other RNA
gctgggcagcctggacccgc

SEQ ID NO: 9846 - RNA, 20 nt, synthetic construct
  source 1..20: mol_type = other RNA
gcttccgccagtacacctac

SEQ ID NO: 9847 - RNA, 20 nt, synthetic construct
  source 1..20: mol_type = other RNA
ggaagactgcggcatccacc

SEQ ID NO: 9848 - RNA, 20 nt, synthetic construct
  source 1..20: mol_type = other RNA
ggaagcgcgggtccaggctg

SEQ ID NO: 9849 - RNA, 20 nt, synthetic construct
  source 1..20: mol_type = other RNA
ggacccgcgcttccgccagt

SEQ ID NO: 9850 - RNA, 20 nt, synthetic construct
  source 1..20: mol_type = other RNA
ggaccgctccctgctgcacc

SEQ ID NO: 9851 - RNA, 20 nt, synthetic construct
  source 1..20: mol_type = other RNA
ggactggctgggcagcctgg

SEQ ID NO: 9852 - RNA, 20 nt, synthetic construct
  source 1..20: mol_type = other RNA
ggagcggtccaggccgcagc

SEQ ID NO: 9853 - RNA, 20 nt, synthetic construct
  source 1..20: mol_type = other RNA
ggagctcaagaccttcgcca

SEQ ID NO: 9854 - RNA, 20 nt, synthetic construct
  source 1..20: mol_type = other RNA
ggagctcacggagctcaaga

SEQ ID NO: 9855 - RNA, 20 nt, synthetic construct
  source 1..20: mol_type = other RNA
ggatgccgcagtcttccagc

SEQ ID NO: 9856 - RNA, 20 nt, synthetic construct
  source 1..20: mol_type = other RNA
ggatgcgggcgcggtgcacg

SEQ ID NO: 9857 - RNA, 20 nt, synthetic construct
  source 1..20: mol_type = other RNA
ggcagcctggacccgcgctt

SEQ ID NO: 9858 - RNA, 20 nt, synthetic construct
  source 1..20: mol_type = other RNA
ggcatccacctgggcgtgca

SEQ ID NO: 9859 - RNA, 20 nt, synthetic construct
  source 1..20: mol_type = other RNA
ggccagaggtcagcccgctc

SEQ ID NO: 9860 - RNA, 20 nt, synthetic construct
  source 1..20: mol_type = other RNA
ggccgcagctgaccaggccg

SEQ ID NO: 9861 - RNA, 20 nt, synthetic construct
  source 1..20: mol_type = other RNA
ggccgccgtgaggatgcggg

SEQ ID NO: 9862 - RNA, 20 nt, synthetic construct
  source 1..20: mol_type = other RNA
ggccgtaggtgtactggcgg

SEQ ID NO: 9863 - RNA, 20 nt, synthetic construct
  source 1..20: mol_type = other RNA
ggcctggaccgctccctgct

SEQ ID NO: 9864 - RNA, 20 nt, synthetic construct
  source 1..20: mol_type = other RNA
ggcctggtcagctgcggcct

SEQ ID NO: 9865 - RNA, 20 nt, synthetic construct
  source 1..20: mol_type = other RNA
ggcgaaggtcttgagctccg

SEQ ID NO: 9866 - RNA, 20 nt, synthetic construct
  source 1..20: mol_type = other RNA
ggcgcggtgcacgcccaggt

SEQ ID NO: 9867 - RNA, 20 nt, synthetic construct
  source 1..20: mol_type = other RNA
ggcggaagcgcgggtccagg

SEQ ID NO: 9868 - RNA, 20 nt, synthetic construct
  source 1..20: mol_type = other RNA
ggcggactggctgggcagcc

SEQ ID NO: 9869 - RNA, 20 nt, synthetic construct
  source 1..20: mol_type = other RNA
ggcggccagaggtcagcccg

SEQ ID NO: 9870 - RNA, 20 nt, synthetic construct
  source 1..20: mol_type = other RNA
ggcggggtcccgggtgagcg

SEQ ID NO: 9871 - RNA, 20 nt, synthetic construct
  source 1..20: mol_type = other RNA
ggcgtgcaccgcgcccgcat

SEQ ID NO: 9872 - RNA, 20 nt, synthetic construct
  source 1..20: mol_type = other RNA
ggctgacctctggccgccgt

SEQ ID NO: 9873 - RNA, 20 nt, synthetic construct
  source 1..20: mol_type = other RNA
ggctgcccagccagtccgcc

SEQ ID NO: 9874 - RNA, 20 nt, synthetic construct
  source 1..20: mol_type = other RNA
ggctgggcagcctggacccg

SEQ ID NO: 9875 - RNA, 20 nt, synthetic construct
  source 1..20: mol_type = other RNA
gggagcggtccaggccgcag

SEQ ID NO: 9876 - RNA, 20 nt, synthetic construct
  source 1..20: mol_type = other RNA
gggagctcacggagctcaag

SEQ ID NO: 9877 - RNA, 20 nt, synthetic construct
  source 1..20: mol_type = other RNA
gggcagcctggacccgcgct

SEQ ID NO: 9878 - RNA, 20 nt, synthetic construct
  source 1..20: mol_type = other RNA
gggcgcggtgcacgcccagg

SEQ ID NO: 9879 - RNA, 20 nt, synthetic construct
  source 1..20: mol_type = other RNA
gggcggggtcccgggtgagc

SEQ ID NO: 9880 - RNA, 20 nt, synthetic construct
  source 1..20: mol_type = other RNA
gggcgtgcaccgcgcccgca

SEQ ID NO: 9881 - RNA, 20 nt, synthetic construct
  source 1..20: mol_type = other RNA
gggctgacctctggccgccg

SEQ ID NO: 9882 - RNA, 20 nt, synthetic construct
  source 1..20: mol_type = other RNA
ggggtcccgggtgagcgggc

SEQ ID NO: 9883 - RNA, 20 nt, synthetic construct
  source 1..20: mol_type = other RNA
gggtccaggctgcccagcca

SEQ ID NO: 9884 - RNA, 20 nt, synthetic construct
  source 1..20: mol_type = other RNA
gggtcccgggtgagcgggct

SEQ ID NO: 9885 - RNA, 20 nt, synthetic construct
  source 1..20: mol_type = other RNA
gggtgagcgggctgacctct

SEQ ID NO: 9886 - RNA, 20 nt, synthetic construct
  source 1..20: mol_type = other RNA
ggtcagcccgctcacccggg

SEQ ID NO: 9887 - RNA, 20 nt, synthetic construct
  source 1..20: mol_type = other RNA
ggtcagctgcggcctggacc

SEQ ID NO: 9888 - RNA, 20 nt, synthetic construct
  source 1..20: mol_type = other RNA
ggtccaggccgcagctgacc

SEQ ID NO: 9889 - RNA, 20 nt, synthetic construct
  source 1..20: mol_type = other RNA
ggtccaggctgcccagccag

SEQ ID NO: 9890 - RNA, 20 nt, synthetic construct
  source 1..20: mol_type = other RNA
ggtcccgggtgagcgggctg

SEQ ID NO: 9891 - RNA, 20 nt, synthetic construct
  source 1..20: mol_type = other RNA
ggtcgcacgtagaatagttg

SEQ ID NO: 9892 - RNA, 20 nt, synthetic construct
  source 1..20: mol_type = other RNA
ggtcttgagctccgtgagct

SEQ ID NO: 9893 - RNA, 20 nt, synthetic construct
  source 1..20: mol_type = other RNA
ggtgagcgggctgacctctg

SEQ ID NO: 9894 - RNA, 20 nt, synthetic construct
  source 1..20: mol_type = other RNA
ggtgcacgcccaggtggatg

SEQ ID NO: 9895 - RNA, 20 nt, synthetic construct
  source 1..20: mol_type = other RNA
ggtgcagcagggagcggtcc

SEQ ID NO: 9896 - RNA, 20 nt, synthetic construct
  source 1..20: mol_type = other RNA
ggtggatgccgcagtcttcc

SEQ ID NO: 9897 - RNA, 20 nt, synthetic construct
  source 1..20: mol_type = other RNA
ggtgtactggcggaagcgcg

SEQ ID NO: 9898 - RNA, 20 nt, synthetic construct
  source 1..20: mol_type = other RNA
ggttgctgcggtcgcacgta

SEQ ID NO: 9899 - RNA, 20 nt, synthetic construct
  source 1..20: mol_type = other RNA
gtacacctacggcctggtca

SEQ ID NO: 9900 - RNA, 20 nt, synthetic construct
  source 1..20: mol_type = other RNA
gtactggcggaagcgcgggt

SEQ ID NO: 9901 - RNA, 20 nt, synthetic construct
  source 1..20: mol_type = other RNA
gtagaatagttggcgaaggt

SEQ ID NO: 9902 - RNA, 20 nt, synthetic construct
  source 1..20: mol_type = other RNA
gtaggtgtactggcggaagc

SEQ ID NO: 9903 - RNA, 20 nt, synthetic construct
  source 1..20: mol_type = other RNA
gtcagcccgctcacccggga

SEQ ID NO: 9904 - RNA, 20 nt, synthetic construct
  source 1..20: mol_type = other RNA
gtcagctgcggcctggaccg

SEQ ID NO: 9905 - RNA, 20 nt, synthetic construct
  source 1..20: mol_type = other RNA
gtccaggccgcagctgacca

SEQ ID NO: 9906 - RNA, 20 nt, synthetic construct
  source 1..20: mol_type = other RNA
gtccaggctgcccagccagt

SEQ ID NO: 9907 - RNA, 20 nt, synthetic construct
  source 1..20: mol_type = other RNA
gtcccgggtgagcgggctga

SEQ ID NO: 9908 - RNA, 20 nt, synthetic construct
  source 1..20: mol_type = other RNA
gtccgccaggttgctgcggt

SEQ ID NO: 9909 - RNA, 20 nt, synthetic construct
  source 1..20: mol_type = other RNA
gtcgcacgtagaatagttgg

SEQ ID NO: 9910 - RNA, 20 nt, synthetic construct
  source 1..20: mol_type = other RNA
gtctgagcagcagctgctgg

SEQ ID NO: 9911 - RNA, 20 nt, synthetic construct
  source 1..20: mol_type = other RNA
gtcttccagcagctgctgct

SEQ ID NO: 9912 - RNA, 20 nt, synthetic construct
  source 1..20: mol_type = other RNA
gtcttgagctccgtgagctc

SEQ ID NO: 9913 - RNA, 20 nt, synthetic construct
  source 1..20: mol_type = other RNA
gtgagcgggctgacctctgg

SEQ ID NO: 9914 - RNA, 20 nt, synthetic construct
  source 1..20: mol_type = other RNA
gtgaggatgcgggcgcggtg

SEQ ID NO: 9915 - RNA, 20 nt, synthetic construct
  source 1..20: mol_type = other RNA
gtgcaccgcgcccgcatcct

SEQ ID NO: 9916 - RNA, 20 nt, synthetic construct
  source 1..20: mol_type = other RNA
gtgcacgcccaggtggatgc

SEQ ID NO: 9917 - RNA, 20 nt, synthetic construct
  source 1..20: mol_type = other RNA
gtgcagcagggagcggtcca

SEQ ID NO: 9918 - RNA, 20 nt, synthetic construct
  source 1..20: mol_type = other RNA
gtgcgaccgcagcaacctgg

SEQ ID NO: 9919 - RNA, 20 nt, synthetic construct
  source 1..20: mol_type = other RNA
gtggatgccgcagtcttcca

SEQ ID NO: 9920 - RNA, 20 nt, synthetic construct
  source 1..20: mol_type = other RNA
gtgtactggcggaagcgcgg

SEQ ID NO: 9921 - RNA, 20 nt, synthetic construct
  source 1..20: mol_type = other RNA
gtgtctgagcagcagctgct

SEQ ID NO: 9922 - RNA, 20 nt, synthetic construct
  source 1..20: mol_type = other RNA
gttctttagggagctcacgg

SEQ ID NO: 9923 - RNA, 20 nt, synthetic construct
  source 1..20: mol_type = other RNA
gttgctgcggtcgcacgtag

SEQ ID NO: 9924 - RNA, 20 nt, synthetic construct
  source 1..20: mol_type = other RNA
gttggcgaaggtcttgagct

SEQ ID NO: 9925 - RNA, 20 nt, synthetic construct
  source 1..20: mol_type = other RNA
tacacctacggcctggtcag

SEQ ID NO: 9926 - RNA, 20 nt, synthetic construct
  source 1..20: mol_type = other RNA
tacggcctggtcagctgcgg

SEQ ID NO: 9927 - RNA, 20 nt, synthetic construct
  source 1..20: mol_type = other RNA
tacgtgcgaccgcagcaacc

SEQ ID NO: 9928 - RNA, 20 nt, synthetic construct
  source 1..20: mol_type = other RNA
tactggcggaagcgcgggtc

SEQ ID NO: 9929 - RNA, 20 nt, synthetic construct
  source 1..20: mol_type = other RNA
tagaatagttggcgaaggtc

SEQ ID NO: 9930 - RNA, 20 nt, synthetic construct
  source 1..20: mol_type = other RNA
tagggagctcacggagctca

SEQ ID NO: 9931 - RNA, 20 nt, synthetic construct
  source 1..20: mol_type = other RNA
taggtgtactggcggaagcg

SEQ ID NO: 9932 - RNA, 20 nt, synthetic construct
  source 1..20: mol_type = other RNA
tagttggcgaaggtcttgag

SEQ ID NO: 9933 - RNA, 20 nt, synthetic construct
  source 1..20: mol_type = other RNA
tattctacgtgcgaccgcag

SEQ ID NO: 9934 - RNA, 20 nt, synthetic construct
  source 1..20: mol_type = other RNA
tcaagaccttcgccaactat

SEQ ID NO: 9935 - RNA, 20 nt, synthetic construct
  source 1..20: mol_type = other RNA
tcacggagctcaagaccttc

SEQ ID NO: 9936 - RNA, 20 nt, synthetic construct
  source 1..20: mol_type = other RNA
tcacggcggccagaggtcag

SEQ ID NO: 9937 - RNA, 20 nt, synthetic construct
  source 1..20: mol_type = other RNA
tcagacacgcggtgcagcag

SEQ ID NO: 9938 - RNA, 20 nt, synthetic construct
  source 1..20: mol_type = other RNA
tcagctgcggcctggaccgc

SEQ ID NO: 9939 - RNA, 20 nt, synthetic construct
  source 1..20: mol_type = other RNA
tccacctgggcgtgcaccgc

SEQ ID NO: 9940 - RNA, 20 nt, synthetic construct
  source 1..20: mol_type = other RNA
tccagcagctgctgctcaga

SEQ ID NO: 9941 - RNA, 20 nt, synthetic construct
  source 1..20: mol_type = other RNA
tccaggccgcagctgaccag

SEQ ID NO: 9942 - RNA, 20 nt, synthetic construct
  source 1..20: mol_type = other RNA
tccaggctgcccagccagtc

SEQ ID NO: 9943 - RNA, 20 nt, synthetic construct
  source 1..20: mol_type = other RNA
tcccgggtgagcgggctgac

SEQ ID NO: 9944 - RNA, 20 nt, synthetic construct
  source 1..20: mol_type = other RNA
tccctgctgcaccgcgtgtc

SEQ ID NO: 9945 - RNA, 20 nt, synthetic construct
  source 1..20: mol_type = other RNA
tccgccaggttgctgcggtc

SEQ ID NO: 9946 - RNA, 20 nt, synthetic construct
  source 1..20: mol_type = other RNA
tccgccagtacacctacggc

SEQ ID NO: 9947 - RNA, 20 nt, synthetic construct
  source 1..20: mol_type = other RNA
tcctcacggcggccagaggt

SEQ ID NO: 9948 - RNA, 20 nt, synthetic construct
  source 1..20: mol_type = other RNA
tcgcacgtagaatagttggc

SEQ ID NO: 9949 - RNA, 20 nt, synthetic construct
  source 1..20: mol_type = other RNA
tcgccaactattctacgtgc

SEQ ID NO: 9950 - RNA, 20 nt, synthetic construct
  source 1..20: mol_type = other RNA
tctacgtgcgaccgcagcaa

SEQ ID NO: 9951 - RNA, 20 nt, synthetic construct
  source 1..20: mol_type = other RNA
tctgagcagcagctgctgga

SEQ ID NO: 9952 - RNA, 20 nt, synthetic construct
  source 1..20: mol_type = other RNA
tctggccgccgtgaggatgc

SEQ ID NO: 9953 - RNA, 20 nt, synthetic construct
  source 1..20: mol_type = other RNA
tcttccagcagctgctgctc

SEQ ID NO: 9954 - RNA, 20 nt, synthetic construct
  source 1..20: mol_type = other RNA
tcttgagctccgtgagctcc

SEQ ID NO: 9955 - RNA, 20 nt, synthetic construct
  source 1..20: mol_type = other RNA
tctttagggagctcacggag

SEQ ID NO: 9956 - RNA, 20 nt, synthetic construct
  source 1..20: mol_type = other RNA
tgaccaggccgtaggtgtac

SEQ ID NO: 9957 - RNA, 20 nt, synthetic construct
  source 1..20: mol_type = other RNA
tgacctctggccgccgtgag

SEQ ID NO: 9958 - RNA, 20 nt, synthetic construct
  source 1..20: mol_type = other RNA
tgagcagcagctgctggaag

SEQ ID NO: 9959 - RNA, 20 nt, synthetic construct
  source 1..20: mol_type = other RNA
tgagcgggctgacctctggc

SEQ ID NO: 9960 - RNA, 20 nt, synthetic construct
  source 1..20: mol_type = other RNA
tgaggatgcgggcgcggtgc

SEQ ID NO: 9961 - RNA, 20 nt, synthetic construct
  source 1..20: mol_type = other RNA
tgcaccgcgcccgcatcctc

SEQ ID NO: 9962 - RNA, 20 nt, synthetic construct
  source 1..20: mol_type = other RNA
tgcaccgcgtgtctgagcag

SEQ ID NO: 9963 - RNA, 20 nt, synthetic construct
  source 1..20: mol_type = other RNA
tgcacgcccaggtggatgcc

SEQ ID NO: 9964 - RNA, 20 nt, synthetic construct
  source 1..20: mol_type = other RNA
tgcagcagggagcggtccag

SEQ ID NO: 9965 - RNA, 20 nt, synthetic construct
  source 1..20: mol_type = other RNA
tgcccagccagtccgccagg

SEQ ID NO: 9966 - RNA, 20 nt, synthetic construct
  source 1..20: mol_type = other RNA
tgccgcagtcttccagcagc

SEQ ID NO: 9967 - RNA, 20 nt, synthetic construct
  source 1..20: mol_type = other RNA
tgcgaccgcagcaacctggc

SEQ ID NO: 9968 - RNA, 20 nt, synthetic construct
  source 1..20: mol_type = other RNA
tgcggcatccacctgggcgt

SEQ ID NO: 9969 - RNA, 20 nt, synthetic construct
  source 1..20: mol_type = other RNA
tgcggcctggaccgctccct

SEQ ID NO: 9970 - RNA, 20 nt, synthetic construct
  source 1..20: mol_type = other RNA
tgcgggcgcggtgcacgccc

SEQ ID NO: 9971 - RNA, 20 nt, synthetic construct
  source 1..20: mol_type = other RNA
tgcggtcgcacgtagaatag

SEQ ID NO: 9972 - RNA, 20 nt, synthetic construct
  source 1..20: mol_type = other RNA
tgctcagacacgcggtgcag

SEQ ID NO: 9973 - RNA, 20 nt, synthetic construct
  source 1..20: mol_type = other RNA
tgctgcaccgcgtgtctgag

SEQ ID NO: 9974 - RNA, 20 nt, synthetic construct
  source 1..20: mol_type = other RNA
tgctgcggtcgcacgtagaa

SEQ ID NO: 9975 - RNA, 20 nt, synthetic construct
  source 1..20: mol_type = other RNA
tgctgctcagacacgcggtg

SEQ ID NO: 9976 - RNA, 20 nt, synthetic construct
  source 1..20: mol_type = other RNA
tgctggaagactgcggcatc

SEQ ID NO: 9977 - RNA, 20 nt, synthetic construct
  source 1..20: mol_type = other RNA
tggaagactgcggcatccac

SEQ ID NO: 9978 - RNA, 20 nt, synthetic construct
  source 1..20: mol_type = other RNA
tggacccgcgcttccgccag

SEQ ID NO: 9979 - RNA, 20 nt, synthetic construct
  source 1..20: mol_type = other RNA
tggaccgctccctgctgcac

SEQ ID NO: 9980 - RNA, 20 nt, synthetic construct
  source 1..20: mol_type = other RNA
tggatgccgcagtcttccag

SEQ ID NO: 9981 - RNA, 20 nt, synthetic construct
  source 1..20: mol_type = other RNA
tggccgccgtgaggatgcgg

SEQ ID NO: 9982 - RNA, 20 nt, synthetic construct
  source 1..20: mol_type = other RNA
tggcgaaggtcttgagctcc

SEQ ID NO: 9983 - RNA, 20 nt, synthetic construct
  source 1..20: mol_type = other RNA
tggcggaagcgcgggtccag

SEQ ID NO: 9984 - RNA, 20 nt, synthetic construct
  source 1..20: mol_type = other RNA
tggcggactggctgggcagc

SEQ ID NO: 9985 - RNA, 20 nt, synthetic construct
  source 1..20: mol_type = other RNA
tggctgggcagcctggaccc

SEQ ID NO: 9986 - RNA, 20 nt, synthetic construct
  source 1..20: mol_type = other RNA
tgggcagcctggacccgcgc

SEQ ID NO: 9987 - RNA, 20 nt, synthetic construct
  source 1..20: mol_type = other RNA
tgggcgtgcaccgcgcccgc

SEQ ID NO: 9988 - RNA, 20 nt, synthetic construct
  source 1..20: mol_type = other RNA
tggtcagctgcggcctggac

SEQ ID NO: 9989 - RNA, 20 nt, synthetic construct
  source 1..20: mol_type = other RNA
tgtactggcggaagcgcggg

SEQ ID NO: 9990 - RNA, 20 nt, synthetic construct
  source 1..20: mol_type = other RNA
tgtctgagcagcagctgctg

SEQ ID NO: 9991 - RNA, 20 nt, synthetic construct
  source 1..20: mol_type = other RNA
ttagggagctcacggagctc

SEQ ID NO: 9992 - RNA, 20 nt, synthetic construct
  source 1..20: mol_type = other RNA
ttccagcagctgctgctcag

SEQ ID NO: 9993 - RNA, 20 nt, synthetic construct
  source 1..20: mol_type = other RNA
ttccgccagtacacctacgg

SEQ ID NO: 9994 - RNA, 20 nt, synthetic construct
  source 1..20: mol_type = other RNA
ttcgccaactattctacgtg

SEQ ID NO: 9995 - RNA, 20 nt, synthetic construct
  source 1..20: mol_type = other RNA
ttctacgtgcgaccgcagca

SEQ ID NO: 9996 - RNA, 20 nt, synthetic construct
  source 1..20: mol_type = other RNA
ttctttagggagctcacgga

SEQ ID NO: 9997 - RNA, 20 nt, synthetic construct
  source 1..20: mol_type = other RNA
ttgctgcggtcgcacgtaga

SEQ ID NO: 9998 - RNA, 20 nt, synthetic construct
  source 1..20: mol_type = other RNA
ttggcgaaggtcttgagctc

SEQ ID NO: 9999 - RNA, 20 nt, synthetic construct
  source 1..20: mol_type = other RNA
tttagggagctcacggagct

SEQ ID NO: 10000 - RNA, 21 nt, synthetic construct
  source 1..21: mol_type = other RNA
aacctggcggactggctgggc

SEQ ID NO: 10001 - RNA, 21 nt, synthetic construct
  source 1..21: mol_type = other RNA
aactattctacgtgcgaccgc

SEQ ID NO: 10002 - RNA, 21 nt, synthetic construct
  source 1..21: mol_type = other RNA
aagaccttcgccaactattct

SEQ ID NO: 10003 - RNA, 21 nt, synthetic construct
  source 1..21: mol_type = other RNA
aagactgcggcatccacctgg

SEQ ID NO: 10004 - RNA, 21 nt, synthetic construct
  source 1..21: mol_type = other RNA
aagcgcgggtccaggctgccc

SEQ ID NO: 10005 - RNA, 21 nt, synthetic construct
  source 1..21: mol_type = other RNA
aaggtcttgagctccgtgagc

SEQ ID NO: 10006 - RNA, 21 nt, synthetic construct
  source 1..21: mol_type = other RNA
aatagttggcgaaggtcttga

SEQ ID NO: 10007 - RNA, 21 nt, synthetic construct
  source 1..21: mol_type = other RNA
acacctacggcctggtcagct

SEQ ID NO: 10008 - RNA, 21 nt, synthetic construct
  source 1..21: mol_type = other RNA
acacgcggtgcagcagggagc

SEQ ID NO: 10009 - RNA, 21 nt, synthetic construct
  source 1..21: mol_type = other RNA
accaggccgtaggtgtactgg

SEQ ID NO: 10010 - RNA, 21 nt, synthetic construct
  source 1..21: mol_type = other RNA
acccgcgcttccgccagtaca

SEQ ID NO: 10011 - RNA, 21 nt, synthetic construct
  source 1..21: mol_type = other RNA
accgcagcaacctggcggact

SEQ ID NO: 10012 - RNA, 21 nt, synthetic construct
  source 1..21: mol_type = other RNA
accgcgcccgcatcctcacgg

SEQ ID NO: 10013 - RNA, 21 nt, synthetic construct
  source 1..21: mol_type = other RNA
accgcgtgtctgagcagcagc

SEQ ID NO: 10014 - RNA, 21 nt, synthetic construct
  source 1..21: mol_type = other RNA
accgctccctgctgcaccgcg

SEQ ID NO: 10015 - RNA, 21 nt, synthetic construct
  source 1..21: mol_type = other RNA
acctacggcctggtcagctgc

SEQ ID NO: 10016 - RNA, 21 nt, synthetic construct
  source 1..21: mol_type = other RNA
acctctggccgccgtgaggat

SEQ ID NO: 10017 - RNA, 21 nt, synthetic construct
  source 1..21: mol_type = other RNA
acctggcggactggctgggca

SEQ ID NO: 10018 - RNA, 21 nt, synthetic construct
  source 1..21: mol_type = other RNA
acctgggcgtgcaccgcgccc

SEQ ID NO: 10019 - RNA, 21 nt, synthetic construct
  source 1..21: mol_type = other RNA
accttcgccaactattctacg

SEQ ID NO: 10020 - RNA, 21 nt, synthetic construct
  source 1..21: mol_type = other RNA
acgcccaggtggatgccgcag

SEQ ID NO: 10021 - RNA, 21 nt, synthetic construct
  source 1..21: mol_type = other RNA
acgcggtgcagcagggagcgg

SEQ ID NO: 10022 - RNA, 21 nt, synthetic construct
  source 1..21: mol_type = other RNA
acggagctcaagaccttcgcc

SEQ ID NO: 10023 - RNA, 21 nt, synthetic construct
  source 1..21: mol_type = other RNA
acggcctggtcagctgcggcc

SEQ ID NO: 10024 - RNA, 21 nt, synthetic construct
  source 1..21: mol_type = other RNA
acggcggccagaggtcagccc

SEQ ID NO: 10025 - RNA, 21 nt, synthetic construct
  source 1..21: mol_type = other RNA
acgtagaatagttggcgaagg

SEQ ID NO: 10026 - RNA, 21 nt, synthetic construct
  source 1..21: mol_type = other RNA
acgtgcgaccgcagcaacctg

SEQ ID NO: 10027 - RNA, 21 nt, synthetic construct
  source 1..21: mol_type = other RNA
actattctacgtgcgaccgca

SEQ ID NO: 10028 - RNA, 21 nt, synthetic construct
  source 1..21: mol_type = other RNA
actgcggcatccacctgggcg

SEQ ID NO: 10029 - RNA, 21 nt, synthetic construct
  source 1..21: mol_type = other RNA
actggcggaagcgcgggtcca

SEQ ID NO: 10030 - RNA, 21 nt, synthetic construct
  source 1..21: mol_type = other RNA
actggctgggcagcctggacc

SEQ ID NO: 10031 - RNA, 21 nt, synthetic construct
  source 1..21: mol_type = other RNA
agaatagttggcgaaggtctt

SEQ ID NO: 10032 - RNA, 21 nt, synthetic construct
  source 1..21: mol_type = other RNA
agacacgcggtgcagcaggga

SEQ ID NO: 10033 - RNA, 21 nt, synthetic construct
  source 1..21: mol_type = other RNA
agaccttcgccaactattcta

SEQ ID NO: 10034 - RNA, 21 nt, synthetic construct
  source 1..21: mol_type = other RNA
agactgcggcatccacctggg

SEQ ID NO: 10035 - RNA, 21 nt, synthetic construct
  source 1..21: mol_type = other RNA
agaggtcagcccgctcacccg

SEQ ID NO: 10036 - RNA, 21 nt, synthetic construct
  source 1..21: mol_type = other RNA
agcaacctggcggactggctg

SEQ ID NO: 10037 - RNA, 21 nt, synthetic construct
  source 1..21: mol_type = other RNA
agcagcagctgctggaagact

SEQ ID NO: 10038 - RNA, 21 nt, synthetic construct
  source 1..21: mol_type = other RNA
agcagctgctgctcagacacg

SEQ ID NO: 10039 - RNA, 21 nt, synthetic construct
  source 1..21: mol_type = other RNA
agcagctgctggaagactgcg

SEQ ID NO: 10040 - RNA, 21 nt, synthetic construct
  source 1..21: mol_type = other RNA
agcagggagcggtccaggccg

SEQ ID NO: 10041 - RNA, 21 nt, synthetic construct
  source 1..21: mol_type = other RNA
agccagtccgccaggttgctg

SEQ ID NO: 10042 - RNA, 21 nt, synthetic construct
  source 1..21: mol_type = other RNA
agcctggacccgcgcttccgc

SEQ ID NO: 10043 - RNA, 21 nt, synthetic construct
  source 1..21: mol_type = other RNA
agcgcgggtccaggctgccca

SEQ ID NO: 10044 - RNA, 21 nt, synthetic construct
  source 1..21: mol_type = other RNA
agcgggctgacctctggccgc

SEQ ID NO: 10045 - RNA, 21 nt, synthetic construct
  source 1..21: mol_type = other RNA
agcggtccaggccgcagctga

SEQ ID NO: 10046 - RNA, 21 nt, synthetic construct
  source 1..21: mol_type = other RNA
agctcaagaccttcgccaact

SEQ ID NO: 10047 - RNA, 21 nt, synthetic construct
  source 1..21: mol_type = other RNA
agctcacggagctcaagacct

SEQ ID NO: 10048 - RNA, 21 nt, synthetic construct
  source 1..21: mol_type = other RNA
agctgaccaggccgtaggtgt

SEQ ID NO: 10049 - RNA, 21 nt, synthetic construct
  source 1..21: mol_type = other RNA
agctgcggcctggaccgctcc

SEQ ID NO: 10050 - RNA, 21 nt, synthetic construct
  source 1..21: mol_type = other RNA
agctgctgctcagacacgcgg

SEQ ID NO: 10051 - RNA, 21 nt, synthetic construct
  source 1..21: mol_type = other RNA
agctgctggaagactgcggca

SEQ ID NO: 10052 - RNA, 21 nt, synthetic construct
  source 1..21: mol_type = other RNA
aggatgcgggcgcggtgcacg

SEQ ID NO: 10053 - RNA, 21 nt, synthetic construct
  source 1..21: mol_type = other RNA
aggccgcagctgaccaggccg

SEQ ID NO: 10054 - RNA, 21 nt, synthetic construct
  source 1..21: mol_type = other RNA
aggccgtaggtgtactggcgg

SEQ ID NO: 10055 - RNA, 21 nt, synthetic construct
  source 1..21: mol_type = other RNA
aggctgcccagccagtccgcc

SEQ ID NO: 10056 - RNA, 21 nt, synthetic construct
  source 1..21: mol_type = other RNA
agggagcggtccaggccgcag

SEQ ID NO: 10057 - RNA, 21 nt, synthetic construct
  source 1..21: mol_type = other RNA
agggagctcacggagctcaag

SEQ ID NO: 10058 - RNA, 21 nt, synthetic construct
  source 1..21: mol_type = other RNA
aggtcagcccgctcacccggg

SEQ ID NO: 10059 - RNA, 21 nt, synthetic construct
  source 1..21: mol_type = other RNA
aggtcttgagctccgtgagct

SEQ ID NO: 10060 - RNA, 21 nt, synthetic construct
  source 1..21: mol_type = other RNA
aggtggatgccgcagtcttcc

SEQ ID NO: 10061 - RNA, 21 nt, synthetic construct
  source 1..21: mol_type = other RNA
aggtgtactggcggaagcgcg

SEQ ID NO: 10062 - RNA, 21 nt, synthetic construct
  source 1..21: mol_type = other RNA
aggttgctgcggtcgcacgta

SEQ ID NO: 10063 - RNA, 21 nt, synthetic construct
  source 1..21: mol_type = other RNA
agtacacctacggcctggtca

SEQ ID NO: 10064 - RNA, 21 nt, synthetic construct
  source 1..21: mol_type = other RNA
agtccgccaggttgctgcggt

SEQ ID NO: 10065 - RNA, 21 nt, synthetic construct
  source 1..21: mol_type = other RNA
agtcttccagcagctgctgct

SEQ ID NO: 10066 - RNA, 21 nt, synthetic construct
  source 1..21: mol_type = other RNA
agttggcgaaggtcttgagct

SEQ ID NO: 10067 - RNA, 21 nt, synthetic construct
  source 1..21: mol_type = other RNA
atagttggcgaaggtcttgag

SEQ ID NO: 10068 - RNA, 21 nt, synthetic construct
  source 1..21: mol_type = other RNA
atccacctgggcgtgcaccgc

SEQ ID NO: 10069 - RNA, 21 nt, synthetic construct
  source 1..21: mol_type = other RNA
atcctcacggcggccagaggt

SEQ ID NO: 10070 - RNA, 21 nt, synthetic construct
  source 1..21: mol_type = other RNA
atgccgcagtcttccagcagc

SEQ ID NO: 10071 - RNA, 21 nt, synthetic construct
  source 1..21: mol_type = other RNA
atgcgggcgcggtgcacgccc

SEQ ID NO: 10072 - RNA, 21 nt, synthetic construct
  source 1..21: mol_type = other RNA
attctacgtgcgaccgcagca

SEQ ID NO: 10073 - RNA, 21 nt, synthetic construct
  source 1..21: mol_type = other RNA
caacctggcggactggctggg

SEQ ID NO: 10074 - RNA, 21 nt, synthetic construct
  source 1..21: mol_type = other RNA
caactattctacgtgcgaccg

SEQ ID NO: 10075 - RNA, 21 nt, synthetic construct
  source 1..21: mol_type = other RNA
caagaccttcgccaactattc

SEQ ID NO: 10076 - RNA, 21 nt, synthetic construct
  source 1..21: mol_type = other RNA
caccgcgcccgcatcctcacg

SEQ ID NO: 10077 - RNA, 21 nt, synthetic construct
  source 1..21: mol_type = other RNA
caccgcgtgtctgagcagcag

SEQ ID NO: 10078 - RNA, 21 nt, synthetic construct
  source 1..21: mol_type = other RNA
cacctacggcctggtcagctg

SEQ ID NO: 10079 - RNA, 21 nt, synthetic construct
  source 1..21: mol_type = other RNA
cacctgggcgtgcaccgcgcc

SEQ ID NO: 10080 - RNA, 21 nt, synthetic construct
  source 1..21: mol_type = other RNA
cacgcccaggtggatgccgca

SEQ ID NO: 10081 - RNA, 21 nt, synthetic construct
  source 1..21: mol_type = other RNA
cacgcggtgcagcagggagcg

SEQ ID NO: 10082 - RNA, 21 nt, synthetic construct
  source 1..21: mol_type = other RNA
cacggagctcaagaccttcgc

SEQ ID NO: 10083 - RNA, 21 nt, synthetic construct
  source 1..21: mol_type = other RNA
cacggcggccagaggtcagcc

SEQ ID NO: 10084 - RNA, 21 nt, synthetic construct
  source 1..21: mol_type = other RNA
cacgtagaatagttggcgaag

SEQ ID NO: 10085 - RNA, 21 nt, synthetic construct
  source 1..21: mol_type = other RNA
cagacacgcggtgcagcaggg

SEQ ID NO: 10086 - RNA, 21 nt, synthetic construct
  source 1..21: mol_type = other RNA
cagaggtcagcccgctcaccc

SEQ ID NO: 10087 - RNA, 21 nt, synthetic construct
  source 1..21: mol_type = other RNA
cagcaacctggcggactggct

SEQ ID NO: 10088 - RNA, 21 nt, synthetic construct
  source 1..21: mol_type = other RNA
cagcagctgctgctcagacac

SEQ ID NO: 10089 - RNA, 21 nt, synthetic construct
  source 1..21: mol_type = other RNA
cagcagctgctggaagactgc

SEQ ID NO: 10090 - RNA, 21 nt, synthetic construct
  source 1..21: mol_type = other RNA
cagcagggagcggtccaggcc

SEQ ID NO: 10091 - RNA, 21 nt, synthetic construct
  source 1..21: mol_type = other RNA
cagccagtccgccaggttgct

SEQ ID NO: 10092 - RNA, 21 nt, synthetic construct
  source 1..21: mol_type = other RNA
cagcctggacccgcgcttccg

SEQ ID NO: 10093 - RNA, 21 nt, synthetic construct
  source 1..21: mol_type = other RNA
cagctgaccaggccgtaggtg

SEQ ID NO: 10094 - RNA, 21 nt, synthetic construct
  source 1..21: mol_type = other RNA
cagctgcggcctggaccgctc

SEQ ID NO: 10095 - RNA, 21 nt, synthetic construct
  source 1..21: mol_type = other RNA
cagctgctgctcagacacgcg

SEQ ID NO: 10096 - RNA, 21 nt, synthetic construct
  source 1..21: mol_type = other RNA
cagctgctggaagactgcggc

SEQ ID NO: 10097 - RNA, 21 nt, synthetic construct
  source 1..21: mol_type = other RNA
caggccgcagctgaccaggcc

SEQ ID NO: 10098 - RNA, 21 nt, synthetic construct
  source 1..21: mol_type = other RNA
caggccgtaggtgtactggcg

SEQ ID NO: 10099 - RNA, 21 nt, synthetic construct
  source 1..21: mol_type = other RNA
caggctgcccagccagtccgc

SEQ ID NO: 10100 - RNA, 21 nt, synthetic construct
  source 1..21: mol_type = other RNA
cagggagcggtccaggccgca

SEQ ID NO: 10101 - RNA, 21 nt, synthetic construct
  source 1..21: mol_type = other RNA
caggtggatgccgcagtcttc

SEQ ID NO: 10102 - RNA, 21 nt, synthetic construct
  source 1..21: mol_type = other RNA
caggttgctgcggtcgcacgt

SEQ ID NO: 10103 - RNA, 21 nt, synthetic construct
  source 1..21: mol_type = other RNA
cagtacacctacggcctggtc

SEQ ID NO: 10104 - RNA, 21 nt, synthetic construct
  source 1..21: mol_type = other RNA
cagtccgccaggttgctgcgg

SEQ ID NO: 10105 - RNA, 21 nt, synthetic construct
  source 1..21: mol_type = other RNA
cagtcttccagcagctgctgc

SEQ ID NO: 10106 - RNA, 21 nt, synthetic construct
  source 1..21: mol_type = other RNA
catccacctgggcgtgcaccg

SEQ ID NO: 10107 - RNA, 21 nt, synthetic construct
  source 1..21: mol_type = other RNA
catcctcacggcggccagagg

SEQ ID NO: 10108 - RNA, 21 nt, synthetic construct
  source 1..21: mol_type = other RNA
ccaactattctacgtgcgacc

SEQ ID NO: 10109 - RNA, 21 nt, synthetic construct
  source 1..21: mol_type = other RNA
ccacctgggcgtgcaccgcgc

SEQ ID NO: 10110 - RNA, 21 nt, synthetic construct
  source 1..21: mol_type = other RNA
ccagaggtcagcccgctcacc

SEQ ID NO: 10111 - RNA, 21 nt, synthetic construct
  source 1..21: mol_type = other RNA
ccagcagctgctgctcagaca

SEQ ID NO: 10112 - RNA, 21 nt, synthetic construct
  source 1..21: mol_type = other RNA
ccagccagtccgccaggttgc

SEQ ID NO: 10113 - RNA, 21 nt, synthetic construct
  source 1..21: mol_type = other RNA
ccaggccgcagctgaccaggc

SEQ ID NO: 10114 - RNA, 21 nt, synthetic construct
  source 1..21: mol_type = other RNA
ccaggccgtaggtgtactggc

SEQ ID NO: 10115 - RNA, 21 nt, synthetic construct
  source 1..21: mol_type = other RNA
ccaggctgcccagccagtccg

SEQ ID NO: 10116 - RNA, 21 nt, synthetic construct
  source 1..21: mol_type = other RNA
ccaggtggatgccgcagtctt

SEQ ID NO: 10117 - RNA, 21 nt, synthetic construct
  source 1..21: mol_type = other RNA
ccaggttgctgcggtcgcacg

SEQ ID NO: 10118 - RNA, 21 nt, synthetic construct
  source 1..21: mol_type = other RNA
ccagtacacctacggcctggt

SEQ ID NO: 10119 - RNA, 21 nt, synthetic construct
  source 1..21: mol_type = other RNA
ccagtccgccaggttgctgcg

SEQ ID NO: 10120 - RNA, 21 nt, synthetic construct
  source 1..21: mol_type = other RNA
cccagccagtccgccaggttg

SEQ ID NO: 10121 - RNA, 21 nt, synthetic construct
  source 1..21: mol_type = other RNA
cccaggtggatgccgcagtct

SEQ ID NO: 10122 - RNA, 21 nt, synthetic construct
  source 1..21: mol_type = other RNA
cccgcatcctcacggcggcca

SEQ ID NO: 10123 - RNA, 21 nt, synthetic construct
  source 1..21: mol_type = other RNA
cccgcgcttccgccagtacac

SEQ ID NO: 10124 - RNA, 21 nt, synthetic construct
  source 1..21: mol_type = other RNA
cccgggtgagcgggctgacct

SEQ ID NO: 10125 - RNA, 21 nt, synthetic construct
  source 1..21: mol_type = other RNA
ccctgctgcaccgcgtgtctg

SEQ ID NO: 10126 - RNA, 21 nt, synthetic construct
  source 1..21: mol_type = other RNA
ccgcagcaacctggcggactg

SEQ ID NO: 10127 - RNA, 21 nt, synthetic construct
  source 1..21: mol_type = other RNA
ccgcagctgaccaggccgtag

SEQ ID NO: 10128 - RNA, 21 nt, synthetic construct
  source 1..21: mol_type = other RNA
ccgcagtcttccagcagctgc

SEQ ID NO: 10129 - RNA, 21 nt, synthetic construct
  source 1..21: mol_type = other RNA
ccgcatcctcacggcggccag

SEQ ID NO: 10130 - RNA, 21 nt, synthetic construct
  source 1..21: mol_type = other RNA
ccgccaggttgctgcggtcgc

SEQ ID NO: 10131 - RNA, 21 nt, synthetic construct
  source 1..21: mol_type = other RNA
ccgccagtacacctacggcct

SEQ ID NO: 10132 - RNA, 21 nt, synthetic construct
  source 1..21: mol_type = other RNA
ccgccgtgaggatgcgggcgc

SEQ ID NO: 10133 - RNA, 21 nt, synthetic construct
  source 1..21: mol_type = other RNA
ccgcgcccgcatcctcacggc

SEQ ID NO: 10134 - RNA, 21 nt, synthetic construct
  source 1..21: mol_type = other RNA
ccgcgcttccgccagtacacc

SEQ ID NO: 10135 - RNA, 21 nt, synthetic construct
  source 1..21: mol_type = other RNA
ccgcgtgtctgagcagcagct

SEQ ID NO: 10136 - RNA, 21 nt, synthetic construct
  source 1..21: mol_type = other RNA
ccgctccctgctgcaccgcgt

SEQ ID NO: 10137 - RNA, 21 nt, synthetic construct
  source 1..21: mol_type = other RNA
ccgggtgagcgggctgacctc

SEQ ID NO: 10138 - RNA, 21 nt, synthetic construct
  source 1..21: mol_type = other RNA
ccgtaggtgtactggcggaag

SEQ ID NO: 10139 - RNA, 21 nt, synthetic construct
  source 1..21: mol_type = other RNA
ccgtgaggatgcgggcgcggt

SEQ ID NO: 10140 - RNA, 21 nt, synthetic construct
  source 1..21: mol_type = other RNA
cctacggcctggtcagctgcg

SEQ ID NO: 10141 - RNA, 21 nt, synthetic construct
  source 1..21: mol_type = other RNA
cctcacggcggccagaggtca

SEQ ID NO: 10142 - RNA, 21 nt, synthetic construct
  source 1..21: mol_type = other RNA
cctctggccgccgtgaggatg

SEQ ID NO: 10143 - RNA, 21 nt, synthetic construct
  source 1..21: mol_type = other RNA
cctgctgcaccgcgtgtctga

SEQ ID NO: 10144 - RNA, 21 nt, synthetic construct
  source 1..21: mol_type = other RNA
cctggacccgcgcttccgcca

SEQ ID NO: 10145 - RNA, 21 nt, synthetic construct
  source 1..21: mol_type = other RNA
cctggaccgctccctgctgca

SEQ ID NO: 10146 - RNA, 21 nt, synthetic construct
  source 1..21: mol_type = other RNA
cctggcggactggctgggcag

SEQ ID NO: 10147 - RNA, 21 nt, synthetic construct
  source 1..21: mol_type = other RNA
cctgggcgtgcaccgcgcccg

SEQ ID NO: 10148 - RNA, 21 nt, synthetic construct
  source 1..21: mol_type = other RNA
cctggtcagctgcggcctgga

SEQ ID NO: 10149 - RNA, 21 nt, synthetic construct
  source 1..21: mol_type = other RNA
ccttcgccaactattctacgt

SEQ ID NO: 10150 - RNA, 21 nt, synthetic construct
  source 1..21: mol_type = other RNA
cgaaggtcttgagctccgtga

SEQ ID NO: 10151 - RNA, 21 nt, synthetic construct
  source 1..21: mol_type = other RNA
cgaccgcagcaacctggcgga

SEQ ID NO: 10152 - RNA, 21 nt, synthetic construct
  source 1..21: mol_type = other RNA
cgcacgtagaatagttggcga

SEQ ID NO: 10153 - RNA, 21 nt, synthetic construct
  source 1..21: mol_type = other RNA
cgcagcaacctggcggactgg

SEQ ID NO: 10154 - RNA, 21 nt, synthetic construct
  source 1..21: mol_type = other RNA
cgcagctgaccaggccgtagg

SEQ ID NO: 10155 - RNA, 21 nt, synthetic construct
  source 1..21: mol_type = other RNA
cgcagtcttccagcagctgct

SEQ ID NO: 10156 - RNA, 21 nt, synthetic construct
  source 1..21: mol_type = other RNA
cgcatcctcacggcggccaga

SEQ ID NO: 10157 - RNA, 21 nt, synthetic construct
  source 1..21: mol_type = other RNA
cgccaactattctacgtgcga

SEQ ID NO: 10158 - RNA, 21 nt, synthetic construct
  source 1..21: mol_type = other RNA
cgccaggttgctgcggtcgca

SEQ ID NO: 10159 - RNA, 21 nt, synthetic construct
  source 1..21: mol_type = other RNA
cgccagtacacctacggcctg

SEQ ID NO: 10160 - RNA, 21 nt, synthetic construct
  source 1..21: mol_type = other RNA
cgcccaggtggatgccgcagt

SEQ ID NO: 10161 - RNA, 21 nt, synthetic construct
  source 1..21: mol_type = other RNA
cgcccgcatcctcacggcggc

SEQ ID NO: 10162 - RNA, 21 nt, synthetic construct
  source 1..21: mol_type = other RNA
cgccgtgaggatgcgggcgcg

SEQ ID NO: 10163 - RNA, 21 nt, synthetic construct
  source 1..21: mol_type = other RNA
cgcgcccgcatcctcacggcg

SEQ ID NO: 10164 - RNA, 21 nt, synthetic construct
  source 1..21: mol_type = other RNA
cgcgcttccgccagtacacct

SEQ ID NO: 10165 - RNA, 21 nt, synthetic construct
  source 1..21: mol_type = other RNA
cgcgggtccaggctgcccagc

SEQ ID NO: 10166 - RNA, 21 nt, synthetic construct
  source 1..21: mol_type = other RNA
cgcggtgcacgcccaggtgga

SEQ ID NO: 10167 - RNA, 21 nt, synthetic construct
  source 1..21: mol_type = other RNA
cgcggtgcagcagggagcggt

SEQ ID NO: 10168 - RNA, 21 nt, synthetic construct
  source 1..21: mol_type = other RNA
cgcgtgtctgagcagcagctg

SEQ ID NO: 10169 - RNA, 21 nt, synthetic construct
  source 1..21: mol_type = other RNA
cgctccctgctgcaccgcgtg

SEQ ID NO: 10170 - RNA, 21 nt, synthetic construct
  source 1..21: mol_type = other RNA
cgcttccgccagtacacctac

SEQ ID NO: 10171 - RNA, 21 nt, synthetic construct
  source 1..21: mol_type = other RNA
cggaagcgcgggtccaggctg

SEQ ID NO: 10172 - RNA, 21 nt, synthetic construct
  source 1..21: mol_type = other RNA
cggactggctgggcagcctgg

SEQ ID NO: 10173 - RNA, 21 nt, synthetic construct
  source 1..21: mol_type = other RNA
cggagctcaagaccttcgcca

SEQ ID NO: 10174 - RNA, 21 nt, synthetic construct
  source 1..21: mol_type = other RNA
cggcatccacctgggcgtgca

SEQ ID NO: 10175 - RNA, 21 nt, synthetic construct
  source 1..21: mol_type = other RNA
cggccagaggtcagcccgctc

SEQ ID NO: 10176 - RNA, 21 nt, synthetic construct
  source 1..21: mol_type = other RNA
cggcctggaccgctccctgct

SEQ ID NO: 10177 - RNA, 21 nt, synthetic construct
  source 1..21: mol_type = other RNA
cggcctggtcagctgcggcct

SEQ ID NO: 10178 - RNA, 21 nt, synthetic construct
  source 1..21: mol_type = other RNA
cggcggccagaggtcagcccg

SEQ ID NO: 10179 - RNA, 21 nt, synthetic construct
  source 1..21: mol_type = other RNA
cgggcgcggtgcacgcccagg

SEQ ID NO: 10180 - RNA, 21 nt, synthetic construct
  source 1..21: mol_type = other RNA
cgggctgacctctggccgccg

SEQ ID NO: 10181 - RNA, 21 nt, synthetic construct
  source 1..21: mol_type = other RNA
cggggtcccgggtgagcgggc

SEQ ID NO: 10182 - RNA, 21 nt, synthetic construct
  source 1..21: mol_type = other RNA
cgggtccaggctgcccagcca

SEQ ID NO: 10183 - RNA, 21 nt, synthetic construct
  source 1..21: mol_type = other RNA
cgggtgagcgggctgacctct

SEQ ID NO: 10184 - RNA, 21 nt, synthetic construct
  source 1..21: mol_type = other RNA
cggtccaggccgcagctgacc

SEQ ID NO: 10185 - RNA, 21 nt, synthetic construct
  source 1..21: mol_type = other RNA
cggtcgcacgtagaatagttg

SEQ ID NO: 10186 - RNA, 21 nt, synthetic construct
  source 1..21: mol_type = other RNA
cggtgcacgcccaggtggatg

SEQ ID NO: 10187 - RNA, 21 nt, synthetic construct
  source 1..21: mol_type = other RNA
cggtgcagcagggagcggtcc

SEQ ID NO: 10188 - RNA, 21 nt, synthetic construct
  source 1..21: mol_type = other RNA
cgtagaatagttggcgaaggt

SEQ ID NO: 10189 - RNA, 21 nt, synthetic construct
  source 1..21: mol_type = other RNA
cgtaggtgtactggcggaagc

SEQ ID NO: 10190 - RNA, 21 nt, synthetic construct
  source 1..21: mol_type = other RNA
cgtgaggatgcgggcgcggtg

SEQ ID NO: 10191 - RNA, 21 nt, synthetic construct
  source 1..21: mol_type = other RNA
cgtgcaccgcgcccgcatcct

SEQ ID NO: 10192 - RNA, 21 nt, synthetic construct
  source 1..21: mol_type = other RNA
cgtgcgaccgcagcaacctgg

SEQ ID NO: 10193 - RNA, 21 nt, synthetic construct
  source 1..21: mol_type = other RNA
cgtgtctgagcagcagctgct

SEQ ID NO: 10194 - RNA, 21 nt, synthetic construct
  source 1..21: mol_type = other RNA
ctacggcctggtcagctgcgg

SEQ ID NO: 10195 - RNA, 21 nt, synthetic construct
  source 1..21: mol_type = other RNA
ctacgtgcgaccgcagcaacc

SEQ ID NO: 10196 - RNA, 21 nt, synthetic construct
  source 1..21: mol_type = other RNA
ctattctacgtgcgaccgcag

SEQ ID NO: 10197 - RNA, 21 nt, synthetic construct
  source 1..21: mol_type = other RNA
ctcaagaccttcgccaactat

SEQ ID NO: 10198 - RNA, 21 nt, synthetic construct
  source 1..21: mol_type = other RNA
ctcacggagctcaagaccttc

SEQ ID NO: 10199 - RNA, 21 nt, synthetic construct
  source 1..21: mol_type = other RNA
ctcacggcggccagaggtcag

SEQ ID NO: 10200 - RNA, 21 nt, synthetic construct
  source 1..21: mol_type = other RNA
ctcagacacgcggtgcagcag

SEQ ID NO: 10201 - RNA, 21 nt, synthetic construct
  source 1..21: mol_type = other RNA
ctccctgctgcaccgcgtgtc

SEQ ID NO: 10202 - RNA, 21 nt, synthetic construct
  source 1..21: mol_type = other RNA
ctctggccgccgtgaggatgc

SEQ ID NO: 10203 - RNA, 21 nt, synthetic construct
  source 1..21: mol_type = other RNA
ctgaccaggccgtaggtgtac

SEQ ID NO: 10204 - RNA, 21 nt, synthetic construct
  source 1..21: mol_type = other RNA
ctgacctctggccgccgtgag

SEQ ID NO: 10205 - RNA, 21 nt, synthetic construct
  source 1..21: mol_type = other RNA
ctgagcagcagctgctggaag

SEQ ID NO: 10206 - RNA, 21 nt, synthetic construct
  source 1..21: mol_type = other RNA
ctgcaccgcgtgtctgagcag

SEQ ID NO: 10207 - RNA, 21 nt, synthetic construct
  source 1..21: mol_type = other RNA
ctgcccagccagtccgccagg

SEQ ID NO: 10208 - RNA, 21 nt, synthetic construct
  source 1..21: mol_type = other RNA
ctgcggcatccacctgggcgt

SEQ ID NO: 10209 - RNA, 21 nt, synthetic construct
  source 1..21: mol_type = other RNA
ctgcggcctggaccgctccct

SEQ ID NO: 10210 - RNA, 21 nt, synthetic construct
  source 1..21: mol_type = other RNA
ctgcggtcgcacgtagaatag

SEQ ID NO: 10211 - RNA, 21 nt, synthetic construct
  source 1..21: mol_type = other RNA
ctgctcagacacgcggtgcag

SEQ ID NO: 10212 - RNA, 21 nt, synthetic construct
  source 1..21: mol_type = other RNA
ctgctgcaccgcgtgtctgag

SEQ ID NO: 10213 - RNA, 21 nt, synthetic construct
  source 1..21: mol_type = other RNA
ctgctgctcagacacgcggtg

SEQ ID NO: 10214 - RNA, 21 nt, synthetic construct
  source 1..21: mol_type = other RNA
ctgctggaagactgcggcatc

SEQ ID NO: 10215 - RNA, 21 nt, synthetic construct
  source 1..21: mol_type = other RNA
ctggaagactgcggcatccac

SEQ ID NO: 10216 - RNA, 21 nt, synthetic construct
  source 1..21: mol_type = other RNA
ctggacccgcgcttccgccag

SEQ ID NO: 10217 - RNA, 21 nt, synthetic construct
  source 1..21: mol_type = other RNA
ctggaccgctccctgctgcac

SEQ ID NO: 10218 - RNA, 21 nt, synthetic construct
  source 1..21: mol_type = other RNA
ctggccgccgtgaggatgcgg

SEQ ID NO: 10219 - RNA, 21 nt, synthetic construct
  source 1..21: mol_type = other RNA
ctggcggaagcgcgggtccag

SEQ ID NO: 10220 - RNA, 21 nt, synthetic construct
  source 1..21: mol_type = other RNA
ctggcggactggctgggcagc

SEQ ID NO: 10221 - RNA, 21 nt, synthetic construct
  source 1..21: mol_type = other RNA
ctggctgggcagcctggaccc

SEQ ID NO: 10222 - RNA, 21 nt, synthetic construct
  source 1..21: mol_type = other RNA
ctgggcagcctggacccgcgc

SEQ ID NO: 10223 - RNA, 21 nt, synthetic construct
  source 1..21: mol_type = other RNA
ctgggcgtgcaccgcgcccgc

SEQ ID NO: 10224 - RNA, 21 nt, synthetic construct
  source 1..21: mol_type = other RNA
ctggtcagctgcggcctggac

SEQ ID NO: 10225 - RNA, 21 nt, synthetic construct
  source 1..21: mol_type = other RNA
cttccagcagctgctgctcag

SEQ ID NO: 10226 - RNA, 21 nt, synthetic construct
  source 1..21: mol_type = other RNA
cttccgccagtacacctacgg

SEQ ID NO: 10227 - RNA, 21 nt, synthetic construct
  source 1..21: mol_type = other RNA
cttcgccaactattctacgtg

SEQ ID NO: 10228 - RNA, 21 nt, synthetic construct
  source 1..21: mol_type = other RNA
ctttagggagctcacggagct

SEQ ID NO: 10229 - RNA, 21 nt, synthetic construct
  source 1..21: mol_type = other RNA
gaagactgcggcatccacctg

SEQ ID NO: 10230 - RNA, 21 nt, synthetic construct
  source 1..21: mol_type = other RNA
gaagcgcgggtccaggctgcc

SEQ ID NO: 10231 - RNA, 21 nt, synthetic construct
  source 1..21: mol_type = other RNA
gaaggtcttgagctccgtgag

SEQ ID NO: 10232 - RNA, 21 nt, synthetic construct
  source 1..21: mol_type = other RNA
gaatagttggcgaaggtcttg

SEQ ID NO: 10233 - RNA, 21 nt, synthetic construct
  source 1..21: mol_type = other RNA
gacacgcggtgcagcagggag

SEQ ID NO: 10234 - RNA, 21 nt, synthetic construct
  source 1..21: mol_type = other RNA
gaccaggccgtaggtgtactg

SEQ ID NO: 10235 - RNA, 21 nt, synthetic construct
  source 1..21: mol_type = other RNA
gacccgcgcttccgccagtac

SEQ ID NO: 10236 - RNA, 21 nt, synthetic construct
  source 1..21: mol_type = other RNA
gaccgcagcaacctggcggac

SEQ ID NO: 10237 - RNA, 21 nt, synthetic construct
  source 1..21: mol_type = other RNA
gaccgctccctgctgcaccgc

SEQ ID NO: 10238 - RNA, 21 nt, synthetic construct
  source 1..21: mol_type = other RNA
gacctctggccgccgtgagga

SEQ ID NO: 10239 - RNA, 21 nt, synthetic construct
  source 1..21: mol_type = other RNA
gaccttcgccaactattctac

SEQ ID NO: 10240 - RNA, 21 nt, synthetic construct
  source 1..21: mol_type = other RNA
gactgcggcatccacctgggc

SEQ ID NO: 10241 - RNA, 21 nt, synthetic construct
  source 1..21: mol_type = other RNA
gactggctgggcagcctggac

SEQ ID NO: 10242 - RNA, 21 nt, synthetic construct
  source 1..21: mol_type = other RNA
gagcagcagctgctggaagac

SEQ ID NO: 10243 - RNA, 21 nt, synthetic construct
  source 1..21: mol_type = other RNA
gagcgggctgacctctggccg

SEQ ID NO: 10244 - RNA, 21 nt, synthetic construct
  source 1..21: mol_type = other RNA
gagcggtccaggccgcagctg

SEQ ID NO: 10245 - RNA, 21 nt, synthetic construct
  source 1..21: mol_type = other RNA
gagctcaagaccttcgccaac

SEQ ID NO: 10246 - RNA, 21 nt, synthetic construct
  source 1..21: mol_type = other RNA
gagctcacggagctcaagacc

SEQ ID NO: 10247 - RNA, 21 nt, synthetic construct
  source 1..21: mol_type = other RNA
gaggatgcgggcgcggtgcac

SEQ ID NO: 10248 - RNA, 21 nt, synthetic construct
  source 1..21: mol_type = other RNA
gaggtcagcccgctcacccgg

SEQ ID NO: 10249 - RNA, 21 nt, synthetic construct
  source 1..21: mol_type = other RNA
gatgccgcagtcttccagcag

SEQ ID NO: 10250 - RNA, 21 nt, synthetic construct
  source 1..21: mol_type = other RNA
gatgcgggcgcggtgcacgcc

SEQ ID NO: 10251 - RNA, 21 nt, synthetic construct
  source 1..21: mol_type = other RNA
gcaacctggcggactggctgg

SEQ ID NO: 10252 - RNA, 21 nt, synthetic construct
  source 1..21: mol_type = other RNA
gcaccgcgcccgcatcctcac

SEQ ID NO: 10253 - RNA, 21 nt, synthetic construct
  source 1..21: mol_type = other RNA
gcaccgcgtgtctgagcagca

SEQ ID NO: 10254 - RNA, 21 nt, synthetic construct
  source 1..21: mol_type = other RNA
gcacgcccaggtggatgccgc

SEQ ID NO: 10255 - RNA, 21 nt, synthetic construct
  source 1..21: mol_type = other RNA
gcacgtagaatagttggcgaa

SEQ ID NO: 10256 - RNA, 21 nt, synthetic construct
  source 1..21: mol_type = other RNA
gcagcaacctggcggactggc

SEQ ID NO: 10257 - RNA, 21 nt, synthetic construct
  source 1..21: mol_type = other RNA
gcagcagctgctggaagactg

SEQ ID NO: 10258 - RNA, 21 nt, synthetic construct
  source 1..21: mol_type = other RNA
gcagcagggagcggtccaggc

SEQ ID NO: 10259 - RNA, 21 nt, synthetic construct
  source 1..21: mol_type = other RNA
gcagcctggacccgcgcttcc

SEQ ID NO: 10260 - RNA, 21 nt, synthetic construct
  source 1..21: mol_type = other RNA
gcagctgaccaggccgtaggt

SEQ ID NO: 10261 - RNA, 21 nt, synthetic construct
  source 1..21: mol_type = other RNA
gcagctgctgctcagacacgc

SEQ ID NO: 10262 - RNA, 21 nt, synthetic construct
  source 1..21: mol_type = other RNA
gcagctgctggaagactgcgg

SEQ ID NO: 10263 - RNA, 21 nt, synthetic construct
  source 1..21: mol_type = other RNA
gcagggagcggtccaggccgc

SEQ ID NO: 10264 - RNA, 21 nt, synthetic construct
  source 1..21: mol_type = other RNA
gcagtcttccagcagctgctg

SEQ ID NO: 10265 - RNA, 21 nt, synthetic construct
  source 1..21: mol_type = other RNA
gcatccacctgggcgtgcacc

SEQ ID NO: 10266 - RNA, 21 nt, synthetic construct
  source 1..21: mol_type = other RNA
gcatcctcacggcggccagag

SEQ ID NO: 10267 - RNA, 21 nt, synthetic construct
  source 1..21: mol_type = other RNA
gccaactattctacgtgcgac

SEQ ID NO: 10268 - RNA, 21 nt, synthetic construct
  source 1..21: mol_type = other RNA
gccagaggtcagcccgctcac

SEQ ID NO: 10269 - RNA, 21 nt, synthetic construct
  source 1..21: mol_type = other RNA
gccaggttgctgcggtcgcac

SEQ ID NO: 10270 - RNA, 21 nt, synthetic construct
  source 1..21: mol_type = other RNA
gccagtacacctacggcctgg

SEQ ID NO: 10271 - RNA, 21 nt, synthetic construct
  source 1..21: mol_type = other RNA
gccagtccgccaggttgctgc

SEQ ID NO: 10272 - RNA, 21 nt, synthetic construct
  source 1..21: mol_type = other RNA
gcccagccagtccgccaggtt

SEQ ID NO: 10273 - RNA, 21 nt, synthetic construct
  source 1..21: mol_type = other RNA
gcccaggtggatgccgcagtc

SEQ ID NO: 10274 - RNA, 21 nt, synthetic construct
  source 1..21: mol_type = other RNA
gcccgcatcctcacggcggcc

SEQ ID NO: 10275 - RNA, 21 nt, synthetic construct
  source 1..21: mol_type = other RNA
gccgcagctgaccaggccgta

SEQ ID NO: 10276 - RNA, 21 nt, synthetic construct
  source 1..21: mol_type = other RNA
gccgcagtcttccagcagctg

SEQ ID NO: 10277 - RNA, 21 nt, synthetic construct
  source 1..21: mol_type = other RNA
gccgccgtgaggatgcgggcg

SEQ ID NO: 10278 - RNA, 21 nt, synthetic construct
  source 1..21: mol_type = other RNA
gccgtaggtgtactggcggaa

SEQ ID NO: 10279 - RNA, 21 nt, synthetic construct
  source 1..21: mol_type = other RNA
gccgtgaggatgcgggcgcgg

SEQ ID NO: 10280 - RNA, 21 nt, synthetic construct
  source 1..21: mol_type = other RNA
gcctggacccgcgcttccgcc

SEQ ID NO: 10281 - RNA, 21 nt, synthetic construct
  source 1..21: mol_type = other RNA
gcctggaccgctccctgctgc

SEQ ID NO: 10282 - RNA, 21 nt, synthetic construct
  source 1..21: mol_type = other RNA
gcctggtcagctgcggcctgg

SEQ ID NO: 10283 - RNA, 21 nt, synthetic construct
  source 1..21: mol_type = other RNA
gcgaaggtcttgagctccgtg

SEQ ID NO: 10284 - RNA, 21 nt, synthetic construct
  source 1..21: mol_type = other RNA
gcgaccgcagcaacctggcgg

SEQ ID NO: 10285 - RNA, 21 nt, synthetic construct
  source 1..21: mol_type = other RNA
gcgcccgcatcctcacggcgg

SEQ ID NO: 10286 - RNA, 21 nt, synthetic construct
  source 1..21: mol_type = other RNA
gcgcgggtccaggctgcccag

SEQ ID NO: 10287 - RNA, 21 nt, synthetic construct
  source 1..21: mol_type = other RNA
gcgcggtgcacgcccaggtgg

SEQ ID NO: 10288 - RNA, 21 nt, synthetic construct
  source 1..21: mol_type = other RNA
gcgcttccgccagtacaccta

SEQ ID NO: 10289 - RNA, 21 nt, synthetic construct
  source 1..21: mol_type = other RNA
gcggaagcgcgggtccaggct

SEQ ID NO: 10290 - RNA, 21 nt, synthetic construct
  source 1..21: mol_type = other RNA
gcggactggctgggcagcctg

SEQ ID NO: 10291 - RNA, 21 nt, synthetic construct
  source 1..21: mol_type = other RNA
gcggcatccacctgggcgtgc

SEQ ID NO: 10292 - RNA, 21 nt, synthetic construct
  source 1..21: mol_type = other RNA
gcggccagaggtcagcccgct

SEQ ID NO: 10293 - RNA, 21 nt, synthetic construct
  source 1..21: mol_type = other RNA
gcggcctggaccgctccctgc

SEQ ID NO: 10294 - RNA, 21 nt, synthetic construct
  source 1..21: mol_type = other RNA
gcgggcgcggtgcacgcccag

SEQ ID NO: 10295 - RNA, 21 nt, synthetic construct
  source 1..21: mol_type = other RNA
gcgggctgacctctggccgcc

SEQ ID NO: 10296 - RNA, 21 nt, synthetic construct
  source 1..21: mol_type = other RNA
gcggggtcccgggtgagcggg

SEQ ID NO: 10297 - RNA, 21 nt, synthetic construct
  source 1..21: mol_type = other RNA
gcgggtccaggctgcccagcc

SEQ ID NO: 10298 - RNA, 21 nt, synthetic construct
  source 1..21: mol_type = other RNA
gcggtccaggccgcagctgac

SEQ ID NO: 10299 - RNA, 21 nt, synthetic construct
  source 1..21: mol_type = other RNA
gcggtcgcacgtagaatagtt

SEQ ID NO: 10300 - RNA, 21 nt, synthetic construct
  source 1..21: mol_type = other RNA
gcggtgcacgcccaggtggat

SEQ ID NO: 10301 - RNA, 21 nt, synthetic construct
  source 1..21: mol_type = other RNA
gcggtgcagcagggagcggtc

SEQ ID NO: 10302 - RNA, 21 nt, synthetic construct
  source 1..21: mol_type = other RNA
gcgtgcaccgcgcccgcatcc

SEQ ID NO: 10303 - RNA, 21 nt, synthetic construct
  source 1..21: mol_type = other RNA
gcgtgtctgagcagcagctgc

SEQ ID NO: 10304 - RNA, 21 nt, synthetic construct
  source 1..21: mol_type = other RNA
gctcaagaccttcgccaacta

SEQ ID NO: 10305 - RNA, 21 nt, synthetic construct
  source 1..21: mol_type = other RNA
gctcacggagctcaagacctt

SEQ ID NO: 10306 - RNA, 21 nt, synthetic construct
  source 1..21: mol_type = other RNA
gctcagacacgcggtgcagca

SEQ ID NO: 10307 - RNA, 21 nt, synthetic construct
  source 1..21: mol_type = other RNA
gctccctgctgcaccgcgtgt

SEQ ID NO: 10308 - RNA, 21 nt, synthetic construct
  source 1..21: mol_type = other RNA
gctgaccaggccgtaggtgta

SEQ ID NO: 10309 - RNA, 21 nt, synthetic construct
  source 1..21: mol_type = other RNA
gctgacctctggccgccgtga

SEQ ID NO: 10310 - RNA, 21 nt, synthetic construct
  source 1..21: mol_type = other RNA
gctgcaccgcgtgtctgagca

SEQ ID NO: 10311 - RNA, 21 nt, synthetic construct
  source 1..21: mol_type = other RNA
gctgcccagccagtccgccag

SEQ ID NO: 10312 - RNA, 21 nt, synthetic construct
  source 1..21: mol_type = other RNA
gctgcggcctggaccgctccc

SEQ ID NO: 10313 - RNA, 21 nt, synthetic construct
  source 1..21: mol_type = other RNA
gctgcggtcgcacgtagaata

SEQ ID NO: 10314 - RNA, 21 nt, synthetic construct
  source 1..21: mol_type = other RNA
gctgctcagacacgcggtgca

SEQ ID NO: 10315 - RNA, 21 nt, synthetic construct
  source 1..21: mol_type = other RNA
gctgctgctcagacacgcggt

SEQ ID NO: 10316 - RNA, 21 nt, synthetic construct
  source 1..21: mol_type = other RNA
gctgctggaagactgcggcat

SEQ ID NO: 10317 - RNA, 21 nt, synthetic construct
  source 1..21: mol_type = other RNA
gctggaagactgcggcatcca

SEQ ID NO: 10318 - RNA, 21 nt, synthetic construct
  source 1..21: mol_type = other RNA
gctgggcagcctggacccgcg

SEQ ID NO: 10319 - RNA, 21 nt, synthetic construct
  source 1..21: mol_type = other RNA
gcttccgccagtacacctacg

SEQ ID NO: 10320 - RNA, 21 nt, synthetic construct
  source 1..21: mol_type = other RNA
ggaagactgcggcatccacct

SEQ ID NO: 10321 - RNA, 21 nt, synthetic construct
  source 1..21: mol_type = other RNA
ggaagcgcgggtccaggctgc

SEQ ID NO: 10322 - RNA, 21 nt, synthetic construct
  source 1..21: mol_type = other RNA
ggacccgcgcttccgccagta

SEQ ID NO: 10323 - RNA, 21 nt, synthetic construct
  source 1..21: mol_type = other RNA
ggaccgctccctgctgcaccg

SEQ ID NO: 10324 - RNA, 21 nt, synthetic construct
  source 1..21: mol_type = other RNA
ggactggctgggcagcctgga

SEQ ID NO: 10325 - RNA, 21 nt, synthetic construct
  source 1..21: mol_type = other RNA
ggagcggtccaggccgcagct

SEQ ID NO: 10326 - RNA, 21 nt, synthetic construct
  source 1..21: mol_type = other RNA
ggagctcaagaccttcgccaa

SEQ ID NO: 10327 - RNA, 21 nt, synthetic construct
  source 1..21: mol_type = other RNA
ggagctcacggagctcaagac

SEQ ID NO: 10328 - RNA, 21 nt, synthetic construct
  source 1..21: mol_type = other RNA
ggatgccgcagtcttccagca

SEQ ID NO: 10329 - RNA, 21 nt, synthetic construct
  source 1..21: mol_type = other RNA
ggatgcgggcgcggtgcacgc

SEQ ID NO: 10330 - RNA, 21 nt, synthetic construct
  source 1..21: mol_type = other RNA
ggcagcctggacccgcgcttc

SEQ ID NO: 10331 - RNA, 21 nt, synthetic construct
  source 1..21: mol_type = other RNA
ggcatccacctgggcgtgcac

SEQ ID NO: 10332 - RNA, 21 nt, synthetic construct
  source 1..21: mol_type = other RNA
ggccagaggtcagcccgctca

SEQ ID NO: 10333 - RNA, 21 nt, synthetic construct
  source 1..21: mol_type = other RNA
ggccgcagctgaccaggccgt

SEQ ID NO: 10334 - RNA, 21 nt, synthetic construct
  source 1..21: mol_type = other RNA
ggccgccgtgaggatgcgggc

SEQ ID NO: 10335 - RNA, 21 nt, synthetic construct
  source 1..21: mol_type = other RNA
ggccgtaggtgtactggcgga

SEQ ID NO: 10336 - RNA, 21 nt, synthetic construct
  source 1..21: mol_type = other RNA
ggcctggaccgctccctgctg

SEQ ID NO: 10337 - RNA, 21 nt, synthetic construct
  source 1..21: mol_type = other RNA
ggcctggtcagctgcggcctg

SEQ ID NO: 10338 - RNA, 21 nt, synthetic construct
  source 1..21: mol_type = other RNA
ggcgaaggtcttgagctccgt

SEQ ID NO: 10339 - RNA, 21 nt, synthetic construct
  source 1..21: mol_type = other RNA
ggcgcggtgcacgcccaggtg

SEQ ID NO: 10340 - RNA, 21 nt, synthetic construct
  source 1..21: mol_type = other RNA
ggcggaagcgcgggtccaggc

SEQ ID NO: 10341 - RNA, 21 nt, synthetic construct
  source 1..21: mol_type = other RNA
ggcggactggctgggcagcct

SEQ ID NO: 10342 - RNA, 21 nt, synthetic construct
  source 1..21: mol_type = other RNA
ggcggccagaggtcagcccgc

SEQ ID NO: 10343 - RNA, 21 nt, synthetic construct
  source 1..21: mol_type = other RNA
ggcggggtcccgggtgagcgg

SEQ ID NO: 10344 - RNA, 21 nt, synthetic construct
  source 1..21: mol_type = other RNA
ggcgtgcaccgcgcccgcatc

SEQ ID NO: 10345 - RNA, 21 nt, synthetic construct
  source 1..21: mol_type = other RNA
ggctgacctctggccgccgtg

SEQ ID NO: 10346 - RNA, 21 nt, synthetic construct
  source 1..21: mol_type = other RNA
ggctgcccagccagtccgcca

SEQ ID NO: 10347 - RNA, 21 nt, synthetic construct
  source 1..21: mol_type = other RNA
ggctgggcagcctggacccgc

SEQ ID NO: 10348 - RNA, 21 nt, synthetic construct
  source 1..21: mol_type = other RNA
gggagcggtccaggccgcagc

SEQ ID NO: 10349 - RNA, 21 nt, synthetic construct
  source 1..21: mol_type = other RNA
gggagctcacggagctcaaga

SEQ ID NO: 10350 - RNA, 21 nt, synthetic construct
  source 1..21: mol_type = other RNA
gggcagcctggacccgcgctt

SEQ ID NO: 10351 - RNA, 21 nt, synthetic construct
  source 1..21: mol_type = other RNA
gggcgcggtgcacgcccaggt

SEQ ID NO: 10352 - RNA, 21 nt, synthetic construct
  source 1..21: mol_type = other RNA
gggcggggtcccgggtgagcg

SEQ ID NO: 10353 - RNA, 21 nt, synthetic construct
  source 1..21: mol_type = other RNA
gggcgtgcaccgcgcccgcat

SEQ ID NO: 10354 - RNA, 21 nt, synthetic construct
  source 1..21: mol_type = other RNA
gggctgacctctggccgccgt

SEQ ID NO: 10355 - RNA, 21 nt, synthetic construct
  source 1..21: mol_type = other RNA
ggggcggggtcccgggtgagc

SEQ ID NO: 10356 - RNA, 21 nt, synthetic construct
  source 1..21: mol_type = other RNA
ggggtcccgggtgagcgggct

SEQ ID NO: 10357 - RNA, 21 nt, synthetic construct
  source 1..21: mol_type = other RNA
gggtccaggctgcccagccag

SEQ ID NO: 10358 - RNA, 21 nt, synthetic construct
  source 1..21: mol_type = other RNA
gggtcccgggtgagcgggctg

SEQ ID NO: 10359 - RNA, 21 nt, synthetic construct
  source 1..21: mol_type = other RNA
gggtgagcgggctgacctctg

SEQ ID NO: 10360 - RNA, 21 nt, synthetic construct
  source 1..21: mol_type = other RNA
ggtcagcccgctcacccggga

SEQ ID NO: 10361 - RNA, 21 nt, synthetic construct
  source 1..21: mol_type = other RNA
ggtcagctgcggcctggaccg

SEQ ID NO: 10362 - RNA, 21 nt, synthetic construct
  source 1..21: mol_type = other RNA
ggtccaggccgcagctgacca

SEQ ID NO: 10363 - RNA, 21 nt, synthetic construct
  source 1..21: mol_type = other RNA
ggtccaggctgcccagccagt

SEQ ID NO: 10364 - RNA, 21 nt, synthetic construct
  source 1..21: mol_type = other RNA
ggtcccgggtgagcgggctga

SEQ ID NO: 10365 - RNA, 21 nt, synthetic construct
  source 1..21: mol_type = other RNA
ggtcgcacgtagaatagttgg

SEQ ID NO: 10366 - RNA, 21 nt, synthetic construct
  source 1..21: mol_type = other RNA
ggtcttgagctccgtgagctc

SEQ ID NO: 10367 - RNA, 21 nt, synthetic construct
  source 1..21: mol_type = other RNA
ggtgagcgggctgacctctgg

SEQ ID NO: 10368 - RNA, 21 nt, synthetic construct
  source 1..21: mol_type = other RNA
ggtgcacgcccaggtggatgc

SEQ ID NO: 10369 - RNA, 21 nt, synthetic construct
  source 1..21: mol_type = other RNA
ggtgcagcagggagcggtcca

SEQ ID NO: 10370 - RNA, 21 nt, synthetic construct
  source 1..21: mol_type = other RNA
ggtggatgccgcagtcttcca

SEQ ID NO: 10371 - RNA, 21 nt, synthetic construct
  source 1..21: mol_type = other RNA
ggtgtactggcggaagcgcgg

SEQ ID NO: 10372 - RNA, 21 nt, synthetic construct
  source 1..21: mol_type = other RNA
ggttgctgcggtcgcacgtag

SEQ ID NO: 10373 - RNA, 21 nt, synthetic construct
  source 1..21: mol_type = other RNA
gtacacctacggcctggtcag

SEQ ID NO: 10374 - RNA, 21 nt, synthetic construct
  source 1..21: mol_type = other RNA
gtactggcggaagcgcgggtc

SEQ ID NO: 10375 - RNA, 21 nt, synthetic construct
  source 1..21: mol_type = other RNA
gtagaatagttggcgaaggtc

SEQ ID NO: 10376 - RNA, 21 nt, synthetic construct
  source 1..21: mol_type = other RNA
gtaggtgtactggcggaagcg

SEQ ID NO: 10377 - RNA, 21 nt, synthetic construct
  source 1..21: mol_type = other RNA
gtcagcccgctcacccgggac

SEQ ID NO: 10378 - RNA, 21 nt, synthetic construct
  source 1..21: mol_type = other RNA
gtcagctgcggcctggaccgc

SEQ ID NO: 10379 - RNA, 21 nt, synthetic construct
  source 1..21: mol_type = other RNA
gtccaggccgcagctgaccag

SEQ ID NO: 10380 - RNA, 21 nt, synthetic construct
  source 1..21: mol_type = other RNA
gtccaggctgcccagccagtc

SEQ ID NO: 10381 - RNA, 21 nt, synthetic construct
  source 1..21: mol_type = other RNA
gtcccgggtgagcgggctgac

SEQ ID NO: 10382 - RNA, 21 nt, synthetic construct
  source 1..21: mol_type = other RNA
gtccgccaggttgctgcggtc

SEQ ID NO: 10383 - RNA, 21 nt, synthetic construct
  source 1..21: mol_type = other RNA
gtcgcacgtagaatagttggc

SEQ ID NO: 10384 - RNA, 21 nt, synthetic construct
  source 1..21: mol_type = other RNA
gtctgagcagcagctgctgga

SEQ ID NO: 10385 - RNA, 21 nt, synthetic construct
  source 1..21: mol_type = other RNA
gtcttccagcagctgctgctc

SEQ ID NO: 10386 - RNA, 21 nt, synthetic construct
  source 1..21: mol_type = other RNA
gtcttgagctccgtgagctcc

SEQ ID NO: 10387 - RNA, 21 nt, synthetic construct
  source 1..21: mol_type = other RNA
gtgagcgggctgacctctggc

SEQ ID NO: 10388 - RNA, 21 nt, synthetic construct
  source 1..21: mol_type = other RNA
gtgaggatgcgggcgcggtgc

SEQ ID NO: 10389 - RNA, 21 nt, synthetic construct
  source 1..21: mol_type = other RNA
gtgcaccgcgcccgcatcctc

SEQ ID NO: 10390 - RNA, 21 nt, synthetic construct
  source 1..21: mol_type = other RNA
gtgcacgcccaggtggatgcc

SEQ ID NO: 10391 - RNA, 21 nt, synthetic construct
  source 1..21: mol_type = other RNA
gtgcagcagggagcggtccag

SEQ ID NO: 10392 - RNA, 21 nt, synthetic construct
  source 1..21: mol_type = other RNA
gtgcgaccgcagcaacctggc

SEQ ID NO: 10393 - RNA, 21 nt, synthetic construct
  source 1..21: mol_type = other RNA
gtggatgccgcagtcttccag

SEQ ID NO: 10394 - RNA, 21 nt, synthetic construct
  source 1..21: mol_type = other RNA
gtgtactggcggaagcgcggg

SEQ ID NO: 10395 - RNA, 21 nt, synthetic construct
  source 1..21: mol_type = other RNA
gtgtctgagcagcagctgctg

SEQ ID NO: 10396 - RNA, 21 nt, synthetic construct
  source 1..21: mol_type = other RNA
gttctttagggagctcacgga

SEQ ID NO: 10397 - RNA, 21 nt, synthetic construct
  source 1..21: mol_type = other RNA
gttgctgcggtcgcacgtaga

SEQ ID NO: 10398 - RNA, 21 nt, synthetic construct
  source 1..21: mol_type = other RNA
gttggcgaaggtcttgagctc

SEQ ID NO: 10399 - RNA, 21 nt, synthetic construct
  source 1..21: mol_type = other RNA
tacacctacggcctggtcagc

SEQ ID NO: 10400 - RNA, 21 nt, synthetic construct
  source 1..21: mol_type = other RNA
tacggcctggtcagctgcggc

SEQ ID NO: 10401 - RNA, 21 nt, synthetic construct
  source 1..21: mol_type = other RNA
tacgtgcgaccgcagcaacct

SEQ ID NO: 10402 - RNA, 21 nt, synthetic construct
  source 1..21: mol_type = other RNA
tactggcggaagcgcgggtcc

SEQ ID NO: 10403 - RNA, 21 nt, synthetic construct
  source 1..21: mol_type = other RNA
tagaatagttggcgaaggtct

SEQ ID NO: 10404 - RNA, 21 nt, synthetic construct
  source 1..21: mol_type = other RNA
tagggagctcacggagctcaa

SEQ ID NO: 10405 - RNA, 21 nt, synthetic construct
  source 1..21: mol_type = other RNA
taggtgtactggcggaagcgc

SEQ ID NO: 10406 - RNA, 21 nt, synthetic construct
  source 1..21: mol_type = other RNA
tagttggcgaaggtcttgagc

SEQ ID NO: 10407 - RNA, 21 nt, synthetic construct
  source 1..21: mol_type = other RNA
tattctacgtgcgaccgcagc

SEQ ID NO: 10408 - RNA, 21 nt, synthetic construct
  source 1..21: mol_type = other RNA
tcaagaccttcgccaactatt

SEQ ID NO: 10409 - RNA, 21 nt, synthetic construct
  source 1..21: mol_type = other RNA
tcacggagctcaagaccttcg

SEQ ID NO: 10410 - RNA, 21 nt, synthetic construct
  source 1..21: mol_type = other RNA
tcacggcggccagaggtcagc

SEQ ID NO: 10411 - RNA, 21 nt, synthetic construct
  source 1..21: mol_type = other RNA
tcagacacgcggtgcagcagg

SEQ ID NO: 10412 - RNA, 21 nt, synthetic construct
  source 1..21: mol_type = other RNA
tcagctgcggcctggaccgct

SEQ ID NO: 10413 - RNA, 21 nt, synthetic construct
  source 1..21: mol_type = other RNA
tccacctgggcgtgcaccgcg

SEQ ID NO: 10414 - RNA, 21 nt, synthetic construct
  source 1..21: mol_type = other RNA
tccagcagctgctgctcagac

SEQ ID NO: 10415 - RNA, 21 nt, synthetic construct
  source 1..21: mol_type = other RNA
tccaggccgcagctgaccagg

SEQ ID NO: 10416 - RNA, 21 nt, synthetic construct
  source 1..21: mol_type = other RNA
tccaggctgcccagccagtcc

SEQ ID NO: 10417 - RNA, 21 nt, synthetic construct
  source 1..21: mol_type = other RNA
tcccgggtgagcgggctgacc

SEQ ID NO: 10418 - RNA, 21 nt, synthetic construct
  source 1..21: mol_type = other RNA
tccctgctgcaccgcgtgtct

SEQ ID NO: 10419 - RNA, 21 nt, synthetic construct
  source 1..21: mol_type = other RNA
tccgccaggttgctgcggtcg

SEQ ID NO: 10420 - RNA, 21 nt, synthetic construct
  source 1..21: mol_type = other RNA
tccgccagtacacctacggcc

SEQ ID NO: 10421 - RNA, 21 nt, synthetic construct
  source 1..21: mol_type = other RNA
tcctcacggcggccagaggtc

SEQ ID NO: 10422 - RNA, 21 nt, synthetic construct
  source 1..21: mol_type = other RNA
tcgcacgtagaatagttggcg

SEQ ID NO: 10423 - RNA, 21 nt, synthetic construct
  source 1..21: mol_type = other RNA
tcgccaactattctacgtgcg

SEQ ID NO: 10424 - RNA, 21 nt, synthetic construct
  source 1..21: mol_type = other RNA
tctacgtgcgaccgcagcaac

SEQ ID NO: 10425 - RNA, 21 nt, synthetic construct
  source 1..21: mol_type = other RNA
tctgagcagcagctgctggaa

SEQ ID NO: 10426 - RNA, 21 nt, synthetic construct
  source 1..21: mol_type = other RNA
tctggccgccgtgaggatgcg

SEQ ID NO: 10427 - RNA, 21 nt, synthetic construct
  source 1..21: mol_type = other RNA
tcttccagcagctgctgctca

SEQ ID NO: 10428 - RNA, 21 nt, synthetic construct
  source 1..21: mol_type = other RNA
tcttgagctccgtgagctccc

SEQ ID NO: 10429 - RNA, 21 nt, synthetic construct
  source 1..21: mol_type = other RNA
tctttagggagctcacggagc

SEQ ID NO: 10430 - RNA, 21 nt, synthetic construct
  source 1..21: mol_type = other RNA
tgaccaggccgtaggtgtact

SEQ ID NO: 10431 - RNA, 21 nt, synthetic construct
  source 1..21: mol_type = other RNA
tgacctctggccgccgtgagg

SEQ ID NO: 10432 - RNA, 21 nt, synthetic construct
  source 1..21: mol_type = other RNA
tgagcagcagctgctggaaga

SEQ ID NO: 10433 - RNA, 21 nt, synthetic construct
  source 1..21: mol_type = other RNA
tgagcgggctgacctctggcc

SEQ ID NO: 10434 - RNA, 21 nt, synthetic construct
  source 1..21: mol_type = other RNA
tgaggatgcgggcgcggtgca

SEQ ID NO: 10435 - RNA, 21 nt, synthetic construct
  source 1..21: mol_type = other RNA
tgcaccgcgcccgcatcctca

SEQ ID NO: 10436 - RNA, 21 nt, synthetic construct
  source 1..21: mol_type = other RNA
tgcaccgcgtgtctgagcagc

SEQ ID NO: 10437 - RNA, 21 nt, synthetic construct
  source 1..21: mol_type = other RNA
tgcacgcccaggtggatgccg

SEQ ID NO: 10438 - RNA, 21 nt, synthetic construct
  source 1..21: mol_type = other RNA
tgcagcagggagcggtccagg

SEQ ID NO: 10439 - RNA, 21 nt, synthetic construct
  source 1..21: mol_type = other RNA
tgcccagccagtccgccaggt

SEQ ID NO: 10440 - RNA, 21 nt, synthetic construct
  source 1..21: mol_type = other RNA
tgccgcagtcttccagcagct

SEQ ID NO: 10441 - RNA, 21 nt, synthetic construct
  source 1..21: mol_type = other RNA
tgcgaccgcagcaacctggcg

SEQ ID NO: 10442 - RNA, 21 nt, synthetic construct
  source 1..21: mol_type = other RNA
tgcggcatccacctgggcgtg

SEQ ID NO: 10443 - RNA, 21 nt, synthetic construct
  source 1..21: mol_type = other RNA
tgcggcctggaccgctccctg

SEQ ID NO: 10444 - RNA, 21 nt, synthetic construct
  source 1..21: mol_type = other RNA
tgcgggcgcggtgcacgccca

SEQ ID NO: 10445 - RNA, 21 nt, synthetic construct
  source 1..21: mol_type = other RNA
tgcggtcgcacgtagaatagt

SEQ ID NO: 10446 - RNA, 21 nt, synthetic construct
  source 1..21: mol_type = other RNA
tgctcagacacgcggtgcagc

SEQ ID NO: 10447 - RNA, 21 nt, synthetic construct
  source 1..21: mol_type = other RNA
tgctgcaccgcgtgtctgagc

SEQ ID NO: 10448 - RNA, 21 nt, synthetic construct
  source 1..21: mol_type = other RNA
tgctgcggtcgcacgtagaat

SEQ ID NO: 10449 - RNA, 21 nt, synthetic construct
  source 1..21: mol_type = other RNA
tgctgctcagacacgcggtgc

SEQ ID NO: 10450 - RNA, 21 nt, synthetic construct
  source 1..21: mol_type = other RNA
tgctggaagactgcggcatcc

SEQ ID NO: 10451 - RNA, 21 nt, synthetic construct
  source 1..21: mol_type = other RNA
tggaagactgcggcatccacc

SEQ ID NO: 10452 - RNA, 21 nt, synthetic construct
  source 1..21: mol_type = other RNA
tggacccgcgcttccgccagt

SEQ ID NO: 10453 - RNA, 21 nt, synthetic construct
  source 1..21: mol_type = other RNA
tggaccgctccctgctgcacc

SEQ ID NO: 10454 - RNA, 21 nt, synthetic construct
  source 1..21: mol_type = other RNA
tggatgccgcagtcttccagc

SEQ ID NO: 10455 - RNA, 21 nt, synthetic construct
  source 1..21: mol_type = other RNA
tggccgccgtgaggatgcggg

SEQ ID NO: 10456 - RNA, 21 nt, synthetic construct
  source 1..21: mol_type = other RNA
tggcgaaggtcttgagctccg

SEQ ID NO: 10457 - RNA, 21 nt, synthetic construct
  source 1..21: mol_type = other RNA
tggcggaagcgcgggtccagg

SEQ ID NO: 10458 - RNA, 21 nt, synthetic construct
  source 1..21: mol_type = other RNA
tggcggactggctgggcagcc

SEQ ID NO: 10459 - RNA, 21 nt, synthetic construct
  source 1..21: mol_type = other RNA
tggctgggcagcctggacccg

SEQ ID NO: 10460 - RNA, 21 nt, synthetic construct
  source 1..21: mol_type = other RNA
tgggcagcctggacccgcgct

SEQ ID NO: 10461 - RNA, 21 nt, synthetic construct
  source 1..21: mol_type = other RNA
tgggcgtgcaccgcgcccgca

SEQ ID NO: 10462 - RNA, 21 nt, synthetic construct
  source 1..21: mol_type = other RNA
tggtcagctgcggcctggacc

SEQ ID NO: 10463 - RNA, 21 nt, synthetic construct
  source 1..21: mol_type = other RNA
tgtactggcggaagcgcgggt

SEQ ID NO: 10464 - RNA, 21 nt, synthetic construct
  source 1..21: mol_type = other RNA
tgtctgagcagcagctgctgg

SEQ ID NO: 10465 - RNA, 21 nt, synthetic construct
  source 1..21: mol_type = other RNA
ttagggagctcacggagctca

SEQ ID NO: 10466 - RNA, 21 nt, synthetic construct
  source 1..21: mol_type = other RNA
ttccagcagctgctgctcaga

SEQ ID NO: 10467 - RNA, 21 nt, synthetic construct
  source 1..21: mol_type = other RNA
ttccgccagtacacctacggc

SEQ ID NO: 10468 - RNA, 21 nt, synthetic construct
  source 1..21: mol_type = other RNA
ttcgccaactattctacgtgc

SEQ ID NO: 10469 - RNA, 21 nt, synthetic construct
  source 1..21: mol_type = other RNA
ttctacgtgcgaccgcagcaa

SEQ ID NO: 10470 - RNA, 21 nt, synthetic construct
  source 1..21: mol_type = other RNA
ttctttagggagctcacggag

SEQ ID NO: 10471 - RNA, 21 nt, synthetic construct
  source 1..21: mol_type = other RNA
ttgctgcggtcgcacgtagaa

SEQ ID NO: 10472 - RNA, 21 nt, synthetic construct
  source 1..21: mol_type = other RNA
ttggcgaaggtcttgagctcc

SEQ ID NO: 10473 - RNA, 21 nt, synthetic construct
  source 1..21: mol_type = other RNA
tttagggagctcacggagctc

SEQ ID NO: 10474 - RNA, 22 nt, synthetic construct
  source 1..22: mol_type = other RNA
aacctggcggactggctgggca

SEQ ID NO: 10475 - RNA, 22 nt, synthetic construct
  source 1..22: mol_type = other RNA
aactattctacgtgcgaccgca

SEQ ID NO: 10476 - RNA, 22 nt, synthetic construct
  source 1..22: mol_type = other RNA
aagaccttcgccaactattcta

SEQ ID NO: 10477 - RNA, 22 nt, synthetic construct
  source 1..22: mol_type = other RNA
aagactgcggcatccacctggg

SEQ ID NO: 10478 - RNA, 22 nt, synthetic construct
  source 1..22: mol_type = other RNA
aagcgcgggtccaggctgccca

SEQ ID NO: 10479 - RNA, 22 nt, synthetic construct
  source 1..22: mol_type = other RNA
aaggtcttgagctccgtgagct

SEQ ID NO: 10480 - RNA, 22 nt, synthetic construct
  source 1..22: mol_type = other RNA
aatagttggcgaaggtcttgag

SEQ ID NO: 10481 - RNA, 22 nt, synthetic construct
  source 1..22: mol_type = other RNA
acacctacggcctggtcagctg

SEQ ID NO: 10482 - RNA, 22 nt, synthetic construct
  source 1..22: mol_type = other RNA
acacgcggtgcagcagggagcg

SEQ ID NO: 10483 - RNA, 22 nt, synthetic construct
  source 1..22: mol_type = other RNA
accaggccgtaggtgtactggc

SEQ ID NO: 10484 - RNA, 22 nt, synthetic construct
  source 1..22: mol_type = other RNA
acccgcgcttccgccagtacac

SEQ ID NO: 10485 - RNA, 22 nt, synthetic construct
  source 1..22: mol_type = other RNA
accgcagcaacctggcggactg

SEQ ID NO: 10486 - RNA, 22 nt, synthetic construct
  source 1..22: mol_type = other RNA
accgcgcccgcatcctcacggc

SEQ ID NO: 10487 - RNA, 22 nt, synthetic construct
  source 1..22: mol_type = other RNA
accgcgtgtctgagcagcagct

SEQ ID NO: 10488 - RNA, 22 nt, synthetic construct
  source 1..22: mol_type = other RNA
accgctccctgctgcaccgcgt

SEQ ID NO: 10489 - RNA, 22 nt, synthetic construct
  source 1..22: mol_type = other RNA
acctacggcctggtcagctgcg

SEQ ID NO: 10490 - RNA, 22 nt, synthetic construct
  source 1..22: mol_type = other RNA
acctctggccgccgtgaggatg

SEQ ID NO: 10491 - RNA, 22 nt, synthetic construct
  source 1..22: mol_type = other RNA
acctggcggactggctgggcag

SEQ ID NO: 10492 - RNA, 22 nt, synthetic construct
  source 1..22: mol_type = other RNA
acctgggcgtgcaccgcgcccg

SEQ ID NO: 10493 - RNA, 22 nt, synthetic construct
  source 1..22: mol_type = other RNA
accttcgccaactattctacgt

SEQ ID NO: 10494 - RNA, 22 nt, synthetic construct
  source 1..22: mol_type = other RNA
acgcccaggtggatgccgcagt

SEQ ID NO: 10495 - RNA, 22 nt, synthetic construct
  source 1..22: mol_type = other RNA
acgcggtgcagcagggagcggt

SEQ ID NO: 10496 - RNA, 22 nt, synthetic construct
  source 1..22: mol_type = other RNA
acggagctcaagaccttcgcca

SEQ ID NO: 10497 - RNA, 22 nt, synthetic construct
  source 1..22: mol_type = other RNA
acggcctggtcagctgcggcct

SEQ ID NO: 10498 - RNA, 22 nt, synthetic construct
  source 1..22: mol_type = other RNA
acggcggccagaggtcagcccg

SEQ ID NO: 10499 - RNA, 22 nt, synthetic construct
  source 1..22: mol_type = other RNA
acgtagaatagttggcgaaggt

SEQ ID NO: 10500 - RNA, 22 nt, synthetic construct
  source 1..22: mol_type = other RNA
acgtgcgaccgcagcaacctgg

SEQ ID NO: 10501 - RNA, 22 nt, synthetic construct
  source 1..22: mol_type = other RNA
actattctacgtgcgaccgcag

SEQ ID NO: 10502 - RNA, 22 nt, synthetic construct
  source 1..22: mol_type = other RNA
actgcggcatccacctgggcgt

SEQ ID NO: 10503 - RNA, 22 nt, synthetic construct
  source 1..22: mol_type = other RNA
actggcggaagcgcgggtccag

SEQ ID NO: 10504 - RNA, 22 nt, synthetic construct
  source 1..22: mol_type = other RNA
actggctgggcagcctggaccc

SEQ ID NO: 10505 - RNA, 22 nt, synthetic construct
  source 1..22: mol_type = other RNA
agaatagttggcgaaggtcttg

SEQ ID NO: 10506 - RNA, 22 nt, synthetic construct
  source 1..22: mol_type = other RNA
agacacgcggtgcagcagggag

SEQ ID NO: 10507 - RNA, 22 nt, synthetic construct
  source 1..22: mol_type = other RNA
agaccttcgccaactattctac

SEQ ID NO: 10508 - RNA, 22 nt, synthetic construct
  source 1..22: mol_type = other RNA
agactgcggcatccacctgggc

SEQ ID NO: 10509 - RNA, 22 nt, synthetic construct
  source 1..22: mol_type = other RNA
agaggtcagcccgctcacccgg

SEQ ID NO: 10510 - RNA, 22 nt, synthetic construct
  source 1..22: mol_type = other RNA
agcaacctggcggactggctgg

SEQ ID NO: 10511 - RNA, 22 nt, synthetic construct
  source 1..22: mol_type = other RNA
agcagcagctgctggaagactg

SEQ ID NO: 10512 - RNA, 22 nt, synthetic construct
  source 1..22: mol_type = other RNA
agcagctgctgctcagacacgc

SEQ ID NO: 10513 - RNA, 22 nt, synthetic construct
  source 1..22: mol_type = other RNA
agcagctgctggaagactgcgg

SEQ ID NO: 10514 - RNA, 22 nt, synthetic construct
  source 1..22: mol_type = other RNA
agcagggagcggtccaggccgc

SEQ ID NO: 10515 - RNA, 22 nt, synthetic construct
  source 1..22: mol_type = other RNA
agccagtccgccaggttgctgc

SEQ ID NO: 10516 - RNA, 22 nt, synthetic construct
  source 1..22: mol_type = other RNA
agcctggacccgcgcttccgcc

SEQ ID NO: 10517 - RNA, 22 nt, synthetic construct
  source 1..22: mol_type = other RNA
agcgcgggtccaggctgcccag

SEQ ID NO: 10518 - RNA, 22 nt, synthetic construct
  source 1..22: mol_type = other RNA
agcgggctgacctctggccgcc

SEQ ID NO: 10519 - RNA, 22 nt, synthetic construct
  source 1..22: mol_type = other RNA
agcggtccaggccgcagctgac

SEQ ID NO: 10520 - RNA, 22 nt, synthetic construct
  source 1..22: mol_type = other RNA
agctcaagaccttcgccaacta

SEQ ID NO: 10521 - RNA, 22 nt, synthetic construct
  source 1..22: mol_type = other RNA
agctcacggagctcaagacctt

SEQ ID NO: 10522 - RNA, 22 nt, synthetic construct
  source 1..22: mol_type = other RNA
agctgaccaggccgtaggtgta

SEQ ID NO: 10523 - RNA, 22 nt, synthetic construct
  source 1..22: mol_type = other RNA
agctgcggcctggaccgctccc

SEQ ID NO: 10524 - RNA, 22 nt, synthetic construct
  source 1..22: mol_type = other RNA
agctgctgctcagacacgcggt

SEQ ID NO: 10525 - RNA, 22 nt, synthetic construct
  source 1..22: mol_type = other RNA
agctgctggaagactgcggcat

SEQ ID NO: 10526 - RNA, 22 nt, synthetic construct
  source 1..22: mol_type = other RNA
aggatgcgggcgcggtgcacgc

SEQ ID NO: 10527 - RNA, 22 nt, synthetic construct
  source 1..22: mol_type = other RNA
aggccgcagctgaccaggccgt

SEQ ID NO: 10528 - RNA, 22 nt, synthetic construct
  source 1..22: mol_type = other RNA
aggccgtaggtgtactggcgga

SEQ ID NO: 10529 - RNA, 22 nt, synthetic construct
  source 1..22: mol_type = other RNA
aggctgcccagccagtccgcca

SEQ ID NO: 10530 - RNA, 22 nt, synthetic construct
  source 1..22: mol_type = other RNA
agggagcggtccaggccgcagc

SEQ ID NO: 10531 - RNA, 22 nt, synthetic construct
  source 1..22: mol_type = other RNA
agggagctcacggagctcaaga

SEQ ID NO: 10532 - RNA, 22 nt, synthetic construct
  source 1..22: mol_type = other RNA
aggtcagcccgctcacccggga

SEQ ID NO: 10533 - RNA, 22 nt, synthetic construct
  source 1..22: mol_type = other RNA
aggtcttgagctccgtgagctc

SEQ ID NO: 10534 - RNA, 22 nt, synthetic construct
  source 1..22: mol_type = other RNA
aggtggatgccgcagtcttcca

SEQ ID NO: 10535 - RNA, 22 nt, synthetic construct
  source 1..22: mol_type = other RNA
aggtgtactggcggaagcgcgg

SEQ ID NO: 10536 - RNA, 22 nt, synthetic construct
  source 1..22: mol_type = other RNA
aggttgctgcggtcgcacgtag

SEQ ID NO: 10537 - RNA, 22 nt, synthetic construct
  source 1..22: mol_type = other RNA
agtacacctacggcctggtcag

SEQ ID NO: 10538 - RNA, 22 nt, synthetic construct
  source 1..22: mol_type = other RNA
agtccgccaggttgctgcggtc

SEQ ID NO: 10539 - RNA, 22 nt, synthetic construct
  source 1..22: mol_type = other RNA
agtcttccagcagctgctgctc

SEQ ID NO: 10540 - RNA, 22 nt, synthetic construct
  source 1..22: mol_type = other RNA
agttggcgaaggtcttgagctc

SEQ ID NO: 10541 - RNA, 22 nt, synthetic construct
  source 1..22: mol_type = other RNA
atagttggcgaaggtcttgagc

SEQ ID NO: 10542 - RNA, 22 nt, synthetic construct
  source 1..22: mol_type = other RNA
atccacctgggcgtgcaccgcg

SEQ ID NO: 10543 - RNA, 22 nt, synthetic construct
  source 1..22: mol_type = other RNA
atcctcacggcggccagaggtc

SEQ ID NO: 10544 - RNA, 22 nt, synthetic construct
  source 1..22: mol_type = other RNA
atgccgcagtcttccagcagct

SEQ ID NO: 10545 - RNA, 22 nt, synthetic construct
  source 1..22: mol_type = other RNA
atgcgggcgcggtgcacgccca

SEQ ID NO: 10546 - RNA, 22 nt, synthetic construct
  source 1..22: mol_type = other RNA
attctacgtgcgaccgcagcaa

SEQ ID NO: 10547 - RNA, 22 nt, synthetic construct
  source 1..22: mol_type = other RNA
caacctggcggactggctgggc

SEQ ID NO: 10548 - RNA, 22 nt, synthetic construct
  source 1..22: mol_type = other RNA
caactattctacgtgcgaccgc

SEQ ID NO: 10549 - RNA, 22 nt, synthetic construct
  source 1..22: mol_type = other RNA
caagaccttcgccaactattct

SEQ ID NO: 10550 - RNA, 22 nt, synthetic construct
  source 1..22: mol_type = other RNA
caccgcgcccgcatcctcacgg

SEQ ID NO: 10551 - RNA, 22 nt, synthetic construct
  source 1..22: mol_type = other RNA
caccgcgtgtctgagcagcagc

SEQ ID NO: 10552 - RNA, 22 nt, synthetic construct
  source 1..22: mol_type = other RNA
cacctacggcctggtcagctgc

SEQ ID NO: 10553 - RNA, 22 nt, synthetic construct
  source 1..22: mol_type = other RNA
cacctgggcgtgcaccgcgccc

SEQ ID NO: 10554 - RNA, 22 nt, synthetic construct
  source 1..22: mol_type = other RNA
cacgcccaggtggatgccgcag

SEQ ID NO: 10555 - RNA, 22 nt, synthetic construct
  source 1..22: mol_type = other RNA
cacgcggtgcagcagggagcgg

SEQ ID NO: 10556 - RNA, 22 nt, synthetic construct
  source 1..22: mol_type = other RNA
cacggagctcaagaccttcgcc

SEQ ID NO: 10557 - RNA, 22 nt, synthetic construct
  source 1..22: mol_type = other RNA
cacggcggccagaggtcagccc

SEQ ID NO: 10558 - RNA, 22 nt, synthetic construct
  source 1..22: mol_type = other RNA
cacgtagaatagttggcgaagg

SEQ ID NO: 10559 - RNA, 22 nt, synthetic construct
  source 1..22: mol_type = other RNA
cagacacgcggtgcagcaggga

SEQ ID NO: 10560 - RNA, 22 nt, synthetic construct
  source 1..22: mol_type = other RNA
cagaggtcagcccgctcacccg

SEQ ID NO: 10561 - RNA, 22 nt, synthetic construct
  source 1..22: mol_type = other RNA
cagcaacctggcggactggctg

SEQ ID NO: 10562 - RNA, 22 nt, synthetic construct
  source 1..22: mol_type = other RNA
cagcagctgctgctcagacacg

SEQ ID NO: 10563 - RNA, 22 nt, synthetic construct
  source 1..22: mol_type = other RNA
cagcagctgctggaagactgcg

SEQ ID NO: 10564 - RNA, 22 nt, synthetic construct
  source 1..22: mol_type = other RNA
cagcagggagcggtccaggccg

SEQ ID NO: 10565 - RNA, 22 nt, synthetic construct
  source 1..22: mol_type = other RNA
cagccagtccgccaggttgctg

SEQ ID NO: 10566 - RNA, 22 nt, synthetic construct
  source 1..22: mol_type = other RNA
cagcctggacccgcgcttccgc

SEQ ID NO: 10567 - RNA, 22 nt, synthetic construct
  source 1..22: mol_type = other RNA
cagctgaccaggccgtaggtgt

SEQ ID NO: 10568 - RNA, 22 nt, synthetic construct
  source 1..22: mol_type = other RNA
cagctgcggcctggaccgctcc

SEQ ID NO: 10569 - RNA, 22 nt, synthetic construct
  source 1..22: mol_type = other RNA
cagctgctgctcagacacgcgg

SEQ ID NO: 10570 - RNA, 22 nt, synthetic construct
  source 1..22: mol_type = other RNA
cagctgctggaagactgcggca

SEQ ID NO: 10571 - RNA, 22 nt, synthetic construct
  source 1..22: mol_type = other RNA
caggccgcagctgaccaggccg

SEQ ID NO: 10572 - RNA, 22 nt, synthetic construct
  source 1..22: mol_type = other RNA
caggccgtaggtgtactggcgg

SEQ ID NO: 10573 - RNA, 22 nt, synthetic construct
  source 1..22: mol_type = other RNA
caggctgcccagccagtccgcc

SEQ ID NO: 10574 - RNA, 22 nt, synthetic construct
  source 1..22: mol_type = other RNA
cagggagcggtccaggccgcag

SEQ ID NO: 10575 - RNA, 22 nt, synthetic construct
  source 1..22: mol_type = other RNA
caggtggatgccgcagtcttcc

SEQ ID NO: 10576 - RNA, 22 nt, synthetic construct
  source 1..22: mol_type = other RNA
caggttgctgcggtcgcacgta

SEQ ID NO: 10577 - RNA, 22 nt, synthetic construct
  source 1..22: mol_type = other RNA
cagtacacctacggcctggtca

SEQ ID NO: 10578 - RNA, 22 nt, synthetic construct
  source 1..22: mol_type = other RNA
cagtccgccaggttgctgcggt

SEQ ID NO: 10579 - RNA, 22 nt, synthetic construct
  source 1..22: mol_type = other RNA
cagtcttccagcagctgctgct

SEQ ID NO: 10580 - RNA, 22 nt, synthetic construct
  source 1..22: mol_type = other RNA
catccacctgggcgtgcaccgc

SEQ ID NO: 10581 - RNA, 22 nt, synthetic construct
  source 1..22: mol_type = other RNA
catcctcacggcggccagaggt

SEQ ID NO: 10582 - RNA, 22 nt, synthetic construct
  source 1..22: mol_type = other RNA
ccaactattctacgtgcgaccg

SEQ ID NO: 10583 - RNA, 22 nt, synthetic construct
  source 1..22: mol_type = other RNA
ccacctgggcgtgcaccgcgcc

SEQ ID NO: 10584 - RNA, 22 nt, synthetic construct
  source 1..22: mol_type = other RNA
ccagaggtcagcccgctcaccc

SEQ ID NO: 10585 - RNA, 22 nt, synthetic construct
  source 1..22: mol_type = other RNA
ccagcagctgctgctcagacac

SEQ ID NO: 10586 - RNA, 22 nt, synthetic construct
  source 1..22: mol_type = other RNA
ccagccagtccgccaggttgct

SEQ ID NO: 10587 - RNA, 22 nt, synthetic construct
  source 1..22: mol_type = other RNA
ccaggccgcagctgaccaggcc

SEQ ID NO: 10588 - RNA, 22 nt, synthetic construct
  source 1..22: mol_type = other RNA
ccaggccgtaggtgtactggcg

SEQ ID NO: 10589 - RNA, 22 nt, synthetic construct
  source 1..22: mol_type = other RNA
ccaggctgcccagccagtccgc

SEQ ID NO: 10590 - RNA, 22 nt, synthetic construct
  source 1..22: mol_type = other RNA
ccaggtggatgccgcagtcttc

SEQ ID NO: 10591 - RNA, 22 nt, synthetic construct
  source 1..22: mol_type = other RNA
ccaggttgctgcggtcgcacgt

SEQ ID NO: 10592 - RNA, 22 nt, synthetic construct
  source 1..22: mol_type = other RNA
ccagtacacctacggcctggtc

SEQ ID NO: 10593 - RNA, 22 nt, synthetic construct
  source 1..22: mol_type = other RNA
ccagtccgccaggttgctgcgg

SEQ ID NO: 10594 - RNA, 22 nt, synthetic construct
  source 1..22: mol_type = other RNA
cccagccagtccgccaggttgc

SEQ ID NO: 10595 - RNA, 22 nt, synthetic construct
  source 1..22: mol_type = other RNA
cccaggtggatgccgcagtctt

SEQ ID NO: 10596 - RNA, 22 nt, synthetic construct
  source 1..22: mol_type = other RNA
cccgcatcctcacggcggccag

SEQ ID NO: 10597 - RNA, 22 nt, synthetic construct
  source 1..22: mol_type = other RNA
cccgcgcttccgccagtacacc

SEQ ID NO: 10598 - RNA, 22 nt, synthetic construct
  source 1..22: mol_type = other RNA
cccgggtgagcgggctgacctc

SEQ ID NO: 10599 - RNA, 22 nt, synthetic construct
  source 1..22: mol_type = other RNA
ccctgctgcaccgcgtgtctga

SEQ ID NO: 10600 - RNA, 22 nt, synthetic construct
  source 1..22: mol_type = other RNA
ccgcagcaacctggcggactgg

SEQ ID NO: 10601 - RNA, 22 nt, synthetic construct
  source 1..22: mol_type = other RNA
ccgcagctgaccaggccgtagg

SEQ ID NO: 10602 - RNA, 22 nt, synthetic construct
  source 1..22: mol_type = other RNA
ccgcagtcttccagcagctgct

SEQ ID NO: 10603 - RNA, 22 nt, synthetic construct
  source 1..22: mol_type = other RNA
ccgcatcctcacggcggccaga

SEQ ID NO: 10604 - RNA, 22 nt, synthetic construct
  source 1..22: mol_type = other RNA
ccgccaggttgctgcggtcgca

SEQ ID NO: 10605 - RNA, 22 nt, synthetic construct
  source 1..22: mol_type = other RNA
ccgccagtacacctacggcctg

SEQ ID NO: 10606 - RNA, 22 nt, synthetic construct
  source 1..22: mol_type = other RNA
ccgccgtgaggatgcgggcgcg

SEQ ID NO: 10607 - RNA, 22 nt, synthetic construct
  source 1..22: mol_type = other RNA
ccgcgcccgcatcctcacggcg

SEQ ID NO: 10608 - RNA, 22 nt, synthetic construct
  source 1..22: mol_type = other RNA
ccgcgcttccgccagtacacct

SEQ ID NO: 10609 - RNA, 22 nt, synthetic construct
  source 1..22: mol_type = other RNA
ccgcgtgtctgagcagcagctg

SEQ ID NO: 10610 - RNA, 22 nt, synthetic construct
  source 1..22: mol_type = other RNA
ccgctccctgctgcaccgcgtg

SEQ ID NO: 10611 - RNA, 22 nt, synthetic construct
  source 1..22: mol_type = other RNA
ccgggtgagcgggctgacctct

SEQ ID NO: 10612 - RNA, 22 nt, synthetic construct
  source 1..22: mol_type = other RNA
ccgtaggtgtactggcggaagc

SEQ ID NO: 10613 - RNA, 22 nt, synthetic construct
  source 1..22: mol_type = other RNA
ccgtgaggatgcgggcgcggtg

SEQ ID NO: 10614 - RNA, 22 nt, synthetic construct
  source 1..22: mol_type = other RNA
cctacggcctggtcagctgcgg

SEQ ID NO: 10615 - RNA, 22 nt, synthetic construct
  source 1..22: mol_type = other RNA
cctcacggcggccagaggtcag

SEQ ID NO: 10616 - RNA, 22 nt, synthetic construct
  source 1..22: mol_type = other RNA
cctctggccgccgtgaggatgc

SEQ ID NO: 10617 - RNA, 22 nt, synthetic construct
  source 1..22: mol_type = other RNA
cctgctgcaccgcgtgtctgag

SEQ ID NO: 10618 - RNA, 22 nt, synthetic construct
  source 1..22: mol_type = other RNA
cctggacccgcgcttccgccag

SEQ ID NO: 10619 - RNA, 22 nt, synthetic construct
  source 1..22: mol_type = other RNA
cctggaccgctccctgctgcac

SEQ ID NO: 10620 - RNA, 22 nt, synthetic construct
  source 1..22: mol_type = other RNA
cctggcggactggctgggcagc

SEQ ID NO: 10621 - RNA, 22 nt, synthetic construct
  source 1..22: mol_type = other RNA
cctgggcgtgcaccgcgcccgc

SEQ ID NO: 10622 - RNA, 22 nt, synthetic construct
  source 1..22: mol_type = other RNA
cctggtcagctgcggcctggac

SEQ ID NO: 10623 - RNA, 22 nt, synthetic construct
  source 1..22: mol_type = other RNA
ccttcgccaactattctacgtg

SEQ ID NO: 10624 - RNA, 22 nt, synthetic construct
  source 1..22: mol_type = other RNA
cgaaggtcttgagctccgtgag

SEQ ID NO: 10625 - RNA, 22 nt, synthetic construct
  source 1..22: mol_type = other RNA
cgaccgcagcaacctggcggac

SEQ ID NO: 10626 - RNA, 22 nt, synthetic construct
  source 1..22: mol_type = other RNA
cgcacgtagaatagttggcgaa

SEQ ID NO: 10627 - RNA, 22 nt, synthetic construct
  source 1..22: mol_type = other RNA
cgcagcaacctggcggactggc

SEQ ID NO: 10628 - RNA, 22 nt, synthetic construct
  source 1..22: mol_type = other RNA
cgcagctgaccaggccgtaggt

SEQ ID NO: 10629 - RNA, 22 nt, synthetic construct
  source 1..22: mol_type = other RNA
cgcagtcttccagcagctgctg

SEQ ID NO: 10630 - RNA, 22 nt, synthetic construct
  source 1..22: mol_type = other RNA
cgcatcctcacggcggccagag

SEQ ID NO: 10631 - RNA, 22 nt, synthetic construct
  source 1..22: mol_type = other RNA
cgccaactattctacgtgcgac

SEQ ID NO: 10632 - RNA, 22 nt, synthetic construct
  source 1..22: mol_type = other RNA
cgccaggttgctgcggtcgcac

SEQ ID NO: 10633 - RNA, 22 nt, synthetic construct
  source 1..22: mol_type = other RNA
cgccagtacacctacggcctgg

SEQ ID NO: 10634 - RNA, 22 nt, synthetic construct
  source 1..22: mol_type = other RNA
cgcccaggtggatgccgcagtc

SEQ ID NO: 10635 - RNA, 22 nt, synthetic construct
  source 1..22: mol_type = other RNA
cgcccgcatcctcacggcggcc

SEQ ID NO: 10636 - RNA, 22 nt, synthetic construct
  source 1..22: mol_type = other RNA
cgccgtgaggatgcgggcgcgg

SEQ ID NO: 10637 - RNA, 22 nt, synthetic construct
  source 1..22: mol_type = other RNA
cgcgcccgcatcctcacggcgg

SEQ ID NO: 10638 - RNA, 22 nt, synthetic construct
  source 1..22: mol_type = other RNA
cgcgcttccgccagtacaccta

SEQ ID NO: 10639 - RNA, 22 nt, synthetic construct
  source 1..22: mol_type = other RNA
cgcgggtccaggctgcccagcc

SEQ ID NO: 10640 - RNA, 22 nt, synthetic construct
  source 1..22: mol_type = other RNA
cgcggtgcacgcccaggtggat

SEQ ID NO: 10641 - RNA, 22 nt, synthetic construct
  source 1..22: mol_type = other RNA
cgcggtgcagcagggagcggtc

SEQ ID NO: 10642 - RNA, 22 nt, synthetic construct
  source 1..22: mol_type = other RNA
cgcgtgtctgagcagcagctgc

SEQ ID NO: 10643 - RNA, 22 nt, synthetic construct
  source 1..22: mol_type = other RNA
cgctccctgctgcaccgcgtgt

SEQ ID NO: 10644 - RNA, 22 nt, synthetic construct
  source 1..22: mol_type = other RNA
cgcttccgccagtacacctacg

SEQ ID NO: 10645 - RNA, 22 nt, synthetic construct
  source 1..22: mol_type = other RNA
cggaagcgcgggtccaggctgc

SEQ ID NO: 10646 - RNA, 22 nt, synthetic construct
  source 1..22: mol_type = other RNA
cggactggctgggcagcctgga

SEQ ID NO: 10647 - RNA, 22 nt, synthetic construct
  source 1..22: mol_type = other RNA
cggagctcaagaccttcgccaa

SEQ ID NO: 10648 - RNA, 22 nt, synthetic construct
  source 1..22: mol_type = other RNA
cggcatccacctgggcgtgcac

SEQ ID NO: 10649 - RNA, 22 nt, synthetic construct
  source 1..22: mol_type = other RNA
cggccagaggtcagcccgctca

SEQ ID NO: 10650 - RNA, 22 nt, synthetic construct
  source 1..22: mol_type = other RNA
cggcctggaccgctccctgctg

SEQ ID NO: 10651 - RNA, 22 nt, synthetic construct
  source 1..22: mol_type = other RNA
cggcctggtcagctgcggcctg

SEQ ID NO: 10652 - RNA, 22 nt, synthetic construct
  source 1..22: mol_type = other RNA
cggcggccagaggtcagcccgc

SEQ ID NO: 10653 - RNA, 22 nt, synthetic construct
  source 1..22: mol_type = other RNA
cgggcgcggtgcacgcccaggt

SEQ ID NO: 10654 - RNA, 22 nt, synthetic construct
  source 1..22: mol_type = other RNA
cgggctgacctctggccgccgt

SEQ ID NO: 10655 - RNA, 22 nt, synthetic construct
  source 1..22: mol_type = other RNA
cggggtcccgggtgagcgggct

SEQ ID NO: 10656 - RNA, 22 nt, synthetic construct
  source 1..22: mol_type = other RNA
cgggtccaggctgcccagccag

SEQ ID NO: 10657 - RNA, 22 nt, synthetic construct
  source 1..22: mol_type = other RNA
cgggtgagcgggctgacctctg

SEQ ID NO: 10658 - RNA, 22 nt, synthetic construct
  source 1..22: mol_type = other RNA
cggtccaggccgcagctgacca

SEQ ID NO: 10659 - RNA, 22 nt, synthetic construct
  source 1..22: mol_type = other RNA
cggtcgcacgtagaatagttgg

SEQ ID NO: 10660 - RNA, 22 nt, synthetic construct
  source 1..22: mol_type = other RNA
cggtgcacgcccaggtggatgc

SEQ ID NO: 10661 - RNA, 22 nt, synthetic construct
  source 1..22: mol_type = other RNA
cggtgcagcagggagcggtcca

SEQ ID NO: 10662 - RNA, 22 nt, synthetic construct
  source 1..22: mol_type = other RNA
cgtagaatagttggcgaaggtc

SEQ ID NO: 10663 - RNA, 22 nt, synthetic construct
  source 1..22: mol_type = other RNA
cgtaggtgtactggcggaagcg

SEQ ID NO: 10664 - RNA, 22 nt, synthetic construct
  source 1..22: mol_type = other RNA
cgtgaggatgcgggcgcggtgc

SEQ ID NO: 10665 - RNA, 22 nt, synthetic construct
  source 1..22: mol_type = other RNA
cgtgcaccgcgcccgcatcctc

SEQ ID NO: 10666 - RNA, 22 nt, synthetic construct
  source 1..22: mol_type = other RNA
cgtgcgaccgcagcaacctggc

SEQ ID NO: 10667 - RNA, 22 nt, synthetic construct
  source 1..22: mol_type = other RNA
cgtgtctgagcagcagctgctg

SEQ ID NO: 10668 - RNA, 22 nt, synthetic construct
  source 1..22: mol_type = other RNA
ctacggcctggtcagctgcggc

SEQ ID NO: 10669 - RNA, 22 nt, synthetic construct
  source 1..22: mol_type = other RNA
ctacgtgcgaccgcagcaacct

SEQ ID NO: 10670 - RNA, 22 nt, synthetic construct
  source 1..22: mol_type = other RNA
ctattctacgtgcgaccgcagc

SEQ ID NO: 10671 - RNA, 22 nt, synthetic construct
  source 1..22: mol_type = other RNA
ctcaagaccttcgccaactatt

SEQ ID NO: 10672 - RNA, 22 nt, synthetic construct
  source 1..22: mol_type = other RNA
ctcacggagctcaagaccttcg

SEQ ID NO: 10673 - RNA, 22 nt, synthetic construct
  source 1..22: mol_type = other RNA
ctcacggcggccagaggtcagc

SEQ ID NO: 10674 - RNA, 22 nt, synthetic construct
  source 1..22: mol_type = other RNA
ctcagacacgcggtgcagcagg

SEQ ID NO: 10675 - RNA, 22 nt, synthetic construct
  source 1..22: mol_type = other RNA
ctccctgctgcaccgcgtgtct

SEQ ID NO: 10676 - RNA, 22 nt, synthetic construct
  source 1..22: mol_type = other RNA
ctctggccgccgtgaggatgcg

SEQ ID NO: 10677 - RNA, 22 nt, synthetic construct
  source 1..22: mol_type = other RNA
ctgaccaggccgtaggtgtact

SEQ ID NO: 10678 - RNA, 22 nt, synthetic construct
  source 1..22: mol_type = other RNA
ctgacctctggccgccgtgagg

SEQ ID NO: 10679 - RNA, 22 nt, synthetic construct
  source 1..22: mol_type = other RNA
ctgagcagcagctgctggaaga

SEQ ID NO: 10680 - RNA, 22 nt, synthetic construct
  source 1..22: mol_type = other RNA
ctgcaccgcgtgtctgagcagc

SEQ ID NO: 10681 - RNA, 22 nt, synthetic construct
  source 1..22: mol_type = other RNA
ctgcccagccagtccgccaggt

SEQ ID NO: 10682 - RNA, 22 nt, synthetic construct
  source 1..22: mol_type = other RNA
ctgcggcatccacctgggcgtg

SEQ ID NO: 10683 - RNA, 22 nt, synthetic construct
  source 1..22: mol_type = other RNA
ctgcggcctggaccgctccctg

SEQ ID NO: 10684 - RNA, 22 nt, synthetic construct
  source 1..22: mol_type = other RNA
ctgcggtcgcacgtagaatagt

SEQ ID NO: 10685 - RNA, 22 nt, synthetic construct
  source 1..22: mol_type = other RNA
ctgctcagacacgcggtgcagc

SEQ ID NO: 10686 - RNA, 22 nt, synthetic construct
  source 1..22: mol_type = other RNA
ctgctgcaccgcgtgtctgagc

SEQ ID NO: 10687 - RNA, 22 nt, synthetic construct
  source 1..22: mol_type = other RNA
ctgctgctcagacacgcggtgc

SEQ ID NO: 10688 - RNA, 22 nt, synthetic construct
  source 1..22: mol_type = other RNA
ctgctggaagactgcggcatcc

SEQ ID NO: 10689 - RNA, 22 nt, synthetic construct
  source 1..22: mol_type = other RNA
ctggaagactgcggcatccacc

SEQ ID NO: 10690 - RNA, 22 nt, synthetic construct
  source 1..22: mol_type = other RNA
ctggacccgcgcttccgccagt

SEQ ID NO: 10691 - RNA, 22 nt, synthetic construct
  source 1..22: mol_type = other RNA
ctggaccgctccctgctgcacc

SEQ ID NO: 10692 - RNA, 22 nt, synthetic construct
  source 1..22: mol_type = other RNA
ctggccgccgtgaggatgcggg

SEQ ID NO: 10693 - RNA, 22 nt, synthetic construct
  source 1..22: mol_type = other RNA
ctggcggaagcgcgggtccagg

SEQ ID NO: 10694 - RNA, 22 nt, synthetic construct
  source 1..22: mol_type = other RNA
ctggcggactggctgggcagcc

SEQ ID NO: 10695 - RNA, 22 nt, synthetic construct
  source 1..22: mol_type = other RNA
ctggctgggcagcctggacccg

SEQ ID NO: 10696 - RNA, 22 nt, synthetic construct
  source 1..22: mol_type = other RNA
ctgggcagcctggacccgcgct

SEQ ID NO: 10697 - RNA, 22 nt, synthetic construct
  source 1..22: mol_type = other RNA
ctgggcgtgcaccgcgcccgca

SEQ ID NO: 10698 - RNA, 22 nt, synthetic construct
  source 1..22: mol_type = other RNA
ctggtcagctgcggcctggacc

SEQ ID NO: 10699 - RNA, 22 nt, synthetic construct
  source 1..22: mol_type = other RNA
cttccagcagctgctgctcaga

SEQ ID NO: 10700 - RNA, 22 nt, synthetic construct
  source 1..22: mol_type = other RNA
cttccgccagtacacctacggc

SEQ ID NO: 10701 - RNA, 22 nt, synthetic construct
  source 1..22: mol_type = other RNA
cttcgccaactattctacgtgc

SEQ ID NO: 10702 - RNA, 22 nt, synthetic construct
  source 1..22: mol_type = other RNA
ctttagggagctcacggagctc

SEQ ID NO: 10703 - RNA, 22 nt, synthetic construct
  source 1..22: mol_type = other RNA
gaagactgcggcatccacctgg

SEQ ID NO: 10704 - RNA, 22 nt, synthetic construct
  source 1..22: mol_type = other RNA
gaagcgcgggtccaggctgccc

SEQ ID NO: 10705 - RNA, 22 nt, synthetic construct
  source 1..22: mol_type = other RNA
gaaggtcttgagctccgtgagc

SEQ ID NO: 10706 - RNA, 22 nt, synthetic construct
  source 1..22: mol_type = other RNA
gaatagttggcgaaggtcttga

SEQ ID NO: 10707 - RNA, 22 nt, synthetic construct
  source 1..22: mol_type = other RNA
gacacgcggtgcagcagggagc

SEQ ID NO: 10708 - RNA, 22 nt, synthetic construct
  source 1..22: mol_type = other RNA
gaccaggccgtaggtgtactgg

SEQ ID NO: 10709 - RNA, 22 nt, synthetic construct
  source 1..22: mol_type = other RNA
gacccgcgcttccgccagtaca

SEQ ID NO: 10710 - RNA, 22 nt, synthetic construct
  source 1..22: mol_type = other RNA
gaccgcagcaacctggcggact

SEQ ID NO: 10711 - RNA, 22 nt, synthetic construct
  source 1..22: mol_type = other RNA
gaccgctccctgctgcaccgcg

SEQ ID NO: 10712 - RNA, 22 nt, synthetic construct
  source 1..22: mol_type = other RNA
gacctctggccgccgtgaggat

SEQ ID NO: 10713 - RNA, 22 nt, synthetic construct
  source 1..22: mol_type = other RNA
gaccttcgccaactattctacg

SEQ ID NO: 10714 - RNA, 22 nt, synthetic construct
  source 1..22: mol_type = other RNA
gactgcggcatccacctgggcg

SEQ ID NO: 10715 - RNA, 22 nt, synthetic construct
  source 1..22: mol_type = other RNA
gactggctgggcagcctggacc

SEQ ID NO: 10716 - RNA, 22 nt, synthetic construct
  source 1..22: mol_type = other RNA
gagcagcagctgctggaagact

SEQ ID NO: 10717 - RNA, 22 nt, synthetic construct
  source 1..22: mol_type = other RNA
gagcgggctgacctctggccgc

SEQ ID NO: 10718 - RNA, 22 nt, synthetic construct
  source 1..22: mol_type = other RNA
gagcggtccaggccgcagctga

SEQ ID NO: 10719 - RNA, 22 nt, synthetic construct
  source 1..22: mol_type = other RNA
gagctcaagaccttcgccaact

SEQ ID NO: 10720 - RNA, 22 nt, synthetic construct
  source 1..22: mol_type = other RNA
gagctcacggagctcaagacct

SEQ ID NO: 10721 - RNA, 22 nt, synthetic construct
  source 1..22: mol_type = other RNA
gaggatgcgggcgcggtgcacg

SEQ ID NO: 10722 - RNA, 22 nt, synthetic construct
  source 1..22: mol_type = other RNA
gaggtcagcccgctcacccggg

SEQ ID NO: 10723 - RNA, 22 nt, synthetic construct
  source 1..22: mol_type = other RNA
gatgccgcagtcttccagcagc

SEQ ID NO: 10724 - RNA, 22 nt, synthetic construct
  source 1..22: mol_type = other RNA
gatgcgggcgcggtgcacgccc

SEQ ID NO: 10725 - RNA, 22 nt, synthetic construct
  source 1..22: mol_type = other RNA
gcaacctggcggactggctggg

SEQ ID NO: 10726 - RNA, 22 nt, synthetic construct
  source 1..22: mol_type = other RNA
gcaccgcgcccgcatcctcacg

SEQ ID NO: 10727 - RNA, 22 nt, synthetic construct
  source 1..22: mol_type = other RNA
gcaccgcgtgtctgagcagcag

SEQ ID NO: 10728 - RNA, 22 nt, synthetic construct
  source 1..22: mol_type = other RNA
gcacgcccaggtggatgccgca

SEQ ID NO: 10729 - RNA, 22 nt, synthetic construct
  source 1..22: mol_type = other RNA
gcacgtagaatagttggcgaag

SEQ ID NO: 10730 - RNA, 22 nt, synthetic construct
  source 1..22: mol_type = other RNA
gcagcaacctggcggactggct

SEQ ID NO: 10731 - RNA, 22 nt, synthetic construct
  source 1..22: mol_type = other RNA
gcagcagctgctggaagactgc

SEQ ID NO: 10732 - RNA, 22 nt, synthetic construct
  source 1..22: mol_type = other RNA
gcagcagggagcggtccaggcc

SEQ ID NO: 10733 - RNA, 22 nt, synthetic construct
  source 1..22: mol_type = other RNA
gcagcctggacccgcgcttccg

SEQ ID NO: 10734 - RNA, 22 nt, synthetic construct
  source 1..22: mol_type = other RNA
gcagctgaccaggccgtaggtg

SEQ ID NO: 10735 - RNA, 22 nt, synthetic construct
  source 1..22: mol_type = other RNA
gcagctgctgctcagacacgcg

SEQ ID NO: 10736 - RNA, 22 nt, synthetic construct
  source 1..22: mol_type = other RNA
gcagctgctggaagactgcggc

SEQ ID NO: 10737 - RNA, 22 nt, synthetic construct
  source 1..22: mol_type = other RNA
gcagggagcggtccaggccgca

SEQ ID NO: 10738 - RNA, 22 nt, synthetic construct
  source 1..22: mol_type = other RNA
gcagtcttccagcagctgctgc

SEQ ID NO: 10739 - RNA, 22 nt, synthetic construct
  source 1..22: mol_type = other RNA
gcatccacctgggcgtgcaccg

SEQ ID NO: 10740 - RNA, 22 nt, synthetic construct
  source 1..22: mol_type = other RNA
gcatcctcacggcggccagagg

SEQ ID NO: 10741 - RNA, 22 nt, synthetic construct
  source 1..22: mol_type = other RNA
gccaactattctacgtgcgacc

SEQ ID NO: 10742 - RNA, 22 nt, synthetic construct
  source 1..22: mol_type = other RNA
gccagaggtcagcccgctcacc

SEQ ID NO: 10743 - RNA, 22 nt, synthetic construct
  source 1..22: mol_type = other RNA
gccaggttgctgcggtcgcacg

SEQ ID NO: 10744 - RNA, 22 nt, synthetic construct
  source 1..22: mol_type = other RNA
gccagtacacctacggcctggt

SEQ ID NO: 10745 - RNA, 22 nt, synthetic construct
  source 1..22: mol_type = other RNA
gccagtccgccaggttgctgcg

SEQ ID NO: 10746 - RNA, 22 nt, synthetic construct
  source 1..22: mol_type = other RNA
gcccagccagtccgccaggttg

SEQ ID NO: 10747 - RNA, 22 nt, synthetic construct
  source 1..22: mol_type = other RNA
gcccaggtggatgccgcagtct

SEQ ID NO: 10748 - RNA, 22 nt, synthetic construct
  source 1..22: mol_type = other RNA
gcccgcatcctcacggcggcca

SEQ ID NO: 10749 - RNA, 22 nt, synthetic construct
  source 1..22: mol_type = other RNA
gccgcagctgaccaggccgtag

SEQ ID NO: 10750 - RNA, 22 nt, synthetic construct
  source 1..22: mol_type = other RNA
gccgcagtcttccagcagctgc

SEQ ID NO: 10751 - RNA, 22 nt, synthetic construct
  source 1..22: mol_type = other RNA
gccgccgtgaggatgcgggcgc

SEQ ID NO: 10752 - RNA, 22 nt, synthetic construct
  source 1..22: mol_type = other RNA
gccgtaggtgtactggcggaag

SEQ ID NO: 10753 - RNA, 22 nt, synthetic construct
  source 1..22: mol_type = other RNA
gccgtgaggatgcgggcgcggt

SEQ ID NO: 10754 - RNA, 22 nt, synthetic construct
  source 1..22: mol_type = other RNA
gcctggacccgcgcttccgcca

SEQ ID NO: 10755 - RNA, 22 nt, synthetic construct
  source 1..22: mol_type = other RNA
gcctggaccgctccctgctgca

SEQ ID NO: 10756 - RNA, 22 nt, synthetic construct
  source 1..22: mol_type = other RNA
gcctggtcagctgcggcctgga

SEQ ID NO: 10757 - RNA, 22 nt, synthetic construct
  source 1..22: mol_type = other RNA
gcgaaggtcttgagctccgtga

SEQ ID NO: 10758 - RNA, 22 nt, synthetic construct
  source 1..22: mol_type = other RNA
gcgaccgcagcaacctggcgga

SEQ ID NO: 10759 - RNA, 22 nt, synthetic construct
  source 1..22: mol_type = other RNA
gcgcccgcatcctcacggcggc

SEQ ID NO: 10760 - RNA, 22 nt, synthetic construct
  source 1..22: mol_type = other RNA
gcgcgggtccaggctgcccagc

SEQ ID NO: 10761 - RNA, 22 nt, synthetic construct
  source 1..22: mol_type = other RNA
gcgcggtgcacgcccaggtgga

SEQ ID NO: 10762 - RNA, 22 nt, synthetic construct
  source 1..22: mol_type = other RNA
gcgcttccgccagtacacctac

SEQ ID NO: 10763 - RNA, 22 nt, synthetic construct
  source 1..22: mol_type = other RNA
gcggaagcgcgggtccaggctg

SEQ ID NO: 10764 - RNA, 22 nt, synthetic construct
  source 1..22: mol_type = other RNA
gcggactggctgggcagcctgg

SEQ ID NO: 10765 - RNA, 22 nt, synthetic construct
  source 1..22: mol_type = other RNA
gcggcatccacctgggcgtgca

SEQ ID NO: 10766 - RNA, 22 nt, synthetic construct
  source 1..22: mol_type = other RNA
gcggccagaggtcagcccgctc

SEQ ID NO: 10767 - RNA, 22 nt, synthetic construct
  source 1..22: mol_type = other RNA
gcggcctggaccgctccctgct

SEQ ID NO: 10768 - RNA, 22 nt, synthetic construct
  source 1..22: mol_type = other RNA
gcgggcgcggtgcacgcccagg

SEQ ID NO: 10769 - RNA, 22 nt, synthetic construct
  source 1..22: mol_type = other RNA
gcgggctgacctctggccgccg

SEQ ID NO: 10770 - RNA, 22 nt, synthetic construct
  source 1..22: mol_type = other RNA
gcggggtcccgggtgagcgggc

SEQ ID NO: 10771 - RNA, 22 nt, synthetic construct
  source 1..22: mol_type = other RNA
gcgggtccaggctgcccagcca

SEQ ID NO: 10772 - RNA, 22 nt, synthetic construct
  source 1..22: mol_type = other RNA
gcggtccaggccgcagctgacc

SEQ ID NO: 10773 - RNA, 22 nt, synthetic construct
  source 1..22: mol_type = other RNA
gcggtcgcacgtagaatagttg

SEQ ID NO: 10774 - RNA, 22 nt, synthetic construct
  source 1..22: mol_type = other RNA
gcggtgcacgcccaggtggatg

SEQ ID NO: 10775 - RNA, 22 nt, synthetic construct
  source 1..22: mol_type = other RNA
gcggtgcagcagggagcggtcc

SEQ ID NO: 10776 - RNA, 22 nt, synthetic construct
  source 1..22: mol_type = other RNA
gcgtgcaccgcgcccgcatcct

SEQ ID NO: 10777 - RNA, 22 nt, synthetic construct
  source 1..22: mol_type = other RNA
gcgtgtctgagcagcagctgct

SEQ ID NO: 10778 - RNA, 22 nt, synthetic construct
  source 1..22: mol_type = other RNA
gctcaagaccttcgccaactat

SEQ ID NO: 10779 - RNA, 22 nt, synthetic construct
  source 1..22: mol_type = other RNA
gctcacggagctcaagaccttc

SEQ ID NO: 10780 - RNA, 22 nt, synthetic construct
  source 1..22: mol_type = other RNA
gctcagacacgcggtgcagcag

SEQ ID NO: 10781 - RNA, 22 nt, synthetic construct
  source 1..22: mol_type = other RNA
gctccctgctgcaccgcgtgtc

SEQ ID NO: 10782 - RNA, 22 nt, synthetic construct
  source 1..22: mol_type = other RNA
gctgaccaggccgtaggtgtac

SEQ ID NO: 10783 - RNA, 22 nt, synthetic construct
  source 1..22: mol_type = other RNA
gctgacctctggccgccgtgag

SEQ ID NO: 10784 - RNA, 22 nt, synthetic construct
  source 1..22: mol_type = other RNA
gctgcaccgcgtgtctgagcag

SEQ ID NO: 10785 - RNA, 22 nt, synthetic construct
  source 1..22: mol_type = other RNA
gctgcccagccagtccgccagg

SEQ ID NO: 10786 - RNA, 22 nt, synthetic construct
  source 1..22: mol_type = other RNA
gctgcggcctggaccgctccct

SEQ ID NO: 10787 - RNA, 22 nt, synthetic construct
  source 1..22: mol_type = other RNA
gctgcggtcgcacgtagaatag

SEQ ID NO: 10788 - RNA, 22 nt, synthetic construct
  source 1..22: mol_type = other RNA
gctgctcagacacgcggtgcag

SEQ ID NO: 10789 - RNA, 22 nt, synthetic construct
  source 1..22: mol_type = other RNA
gctgctgctcagacacgcggtg

SEQ ID NO: 10790 - RNA, 22 nt, synthetic construct
  source 1..22: mol_type = other RNA
gctgctggaagactgcggcatc

SEQ ID NO: 10791 - RNA, 22 nt, synthetic construct
  source 1..22: mol_type = other RNA
gctggaagactgcggcatccac

SEQ ID NO: 10792 - RNA, 22 nt, synthetic construct
  source 1..22: mol_type = other RNA
gctgggcagcctggacccgcgc

SEQ ID NO: 10793 - RNA, 22 nt, synthetic construct
  source 1..22: mol_type = other RNA
gcttccgccagtacacctacgg

SEQ ID NO: 10794 - RNA, 22 nt, synthetic construct
  source 1..22: mol_type = other RNA
ggaagactgcggcatccacctg

SEQ ID NO: 10795 - RNA, 22 nt, synthetic construct
  source 1..22: mol_type = other RNA
ggaagcgcgggtccaggctgcc

SEQ ID NO: 10796 - RNA, 22 nt, synthetic construct
  source 1..22: mol_type = other RNA
ggacccgcgcttccgccagtac

SEQ ID NO: 10797 - RNA, 22 nt, synthetic construct
  source 1..22: mol_type = other RNA
ggaccgctccctgctgcaccgc

SEQ ID NO: 10798 - RNA, 22 nt, synthetic construct
  source 1..22: mol_type = other RNA
ggactggctgggcagcctggac

SEQ ID NO: 10799 - RNA, 22 nt, synthetic construct
  source 1..22: mol_type = other RNA
ggagcggtccaggccgcagctg

SEQ ID NO: 10800 - RNA, 22 nt, synthetic construct
  source 1..22: mol_type = other RNA
ggagctcaagaccttcgccaac

SEQ ID NO: 10801 - RNA, 22 nt, synthetic construct
  source 1..22: mol_type = other RNA
ggagctcacggagctcaagacc

SEQ ID NO: 10802 - RNA, 22 nt, synthetic construct
  source 1..22: mol_type = other RNA
ggatgccgcagtcttccagcag

SEQ ID NO: 10803 - RNA, 22 nt, synthetic construct
  source 1..22: mol_type = other RNA
ggatgcgggcgcggtgcacgcc

SEQ ID NO: 10804 - RNA, 22 nt, synthetic construct
  source 1..22: mol_type = other RNA
ggcagcctggacccgcgcttcc

SEQ ID NO: 10805 - RNA, 22 nt, synthetic construct
  source 1..22: mol_type = other RNA
ggcatccacctgggcgtgcacc

SEQ ID NO: 10806 - RNA, 22 nt, synthetic construct
  source 1..22: mol_type = other RNA
ggccagaggtcagcccgctcac

SEQ ID NO: 10807 - RNA, 22 nt, synthetic construct
  source 1..22: mol_type = other RNA
ggccgcagctgaccaggccgta

SEQ ID NO: 10808 - RNA, 22 nt, synthetic construct
  source 1..22: mol_type = other RNA
ggccgccgtgaggatgcgggcg

SEQ ID NO: 10809 - RNA, 22 nt, synthetic construct
  source 1..22: mol_type = other RNA
ggccgtaggtgtactggcggaa

SEQ ID NO: 10810 - RNA, 22 nt, synthetic construct
  source 1..22: mol_type = other RNA
ggcctggaccgctccctgctgc

SEQ ID NO: 10811 - RNA, 22 nt, synthetic construct
  source 1..22: mol_type = other RNA
ggcctggtcagctgcggcctgg

SEQ ID NO: 10812 - RNA, 22 nt, synthetic construct
  source 1..22: mol_type = other RNA
ggcgaaggtcttgagctccgtg

SEQ ID NO: 10813 - RNA, 22 nt, synthetic construct
  source 1..22: mol_type = other RNA
ggcgcggtgcacgcccaggtgg

SEQ ID NO: 10814 - RNA, 22 nt, synthetic construct
  source 1..22: mol_type = other RNA
ggcggaagcgcgggtccaggct

SEQ ID NO: 10815 - RNA, 22 nt, synthetic construct
  source 1..22: mol_type = other RNA
ggcggactggctgggcagcctg

SEQ ID NO: 10816 - RNA, 22 nt, synthetic construct
  source 1..22: mol_type = other RNA
ggcggccagaggtcagcccgct

SEQ ID NO: 10817 - RNA, 22 nt, synthetic construct
  source 1..22: mol_type = other RNA
ggcggggtcccgggtgagcggg

SEQ ID NO: 10818 - RNA, 22 nt, synthetic construct
  source 1..22: mol_type = other RNA
ggcgtgcaccgcgcccgcatcc

SEQ ID NO: 10819 - RNA, 22 nt, synthetic construct
  source 1..22: mol_type = other RNA
ggctgacctctggccgccgtga

SEQ ID NO: 10820 - RNA, 22 nt, synthetic construct
  source 1..22: mol_type = other RNA
ggctgcccagccagtccgccag

SEQ ID NO: 10821 - RNA, 22 nt, synthetic construct
  source 1..22: mol_type = other RNA
ggctgggcagcctggacccgcg

SEQ ID NO: 10822 - RNA, 22 nt, synthetic construct
  source 1..22: mol_type = other RNA
gggagcggtccaggccgcagct

SEQ ID NO: 10823 - RNA, 22 nt, synthetic construct
  source 1..22: mol_type = other RNA
gggagctcacggagctcaagac

SEQ ID NO: 10824 - RNA, 22 nt, synthetic construct
  source 1..22: mol_type = other RNA
gggcagcctggacccgcgcttc

SEQ ID NO: 10825 - RNA, 22 nt, synthetic construct
  source 1..22: mol_type = other RNA
gggcgcggtgcacgcccaggtg

SEQ ID NO: 10826 - RNA, 22 nt, synthetic construct
  source 1..22: mol_type = other RNA
gggcggggtcccgggtgagcgg

SEQ ID NO: 10827 - RNA, 22 nt, synthetic construct
  source 1..22: mol_type = other RNA
gggcgtgcaccgcgcccgcatc

SEQ ID NO: 10828 - RNA, 22 nt, synthetic construct
  source 1..22: mol_type = other RNA
gggctgacctctggccgccgtg

SEQ ID NO: 10829 - RNA, 22 nt, synthetic construct
  source 1..22: mol_type = other RNA
ggggcggggtcccgggtgagcg

SEQ ID NO: 10830 - RNA, 22 nt, synthetic construct
  source 1..22: mol_type = other RNA
ggggtcccgggtgagcgggctg

SEQ ID NO: 10831 - RNA, 22 nt, synthetic construct
  source 1..22: mol_type = other RNA
gggtccaggctgcccagccagt

SEQ ID NO: 10832 - RNA, 22 nt, synthetic construct
  source 1..22: mol_type = other RNA
gggtcccgggtgagcgggctga

SEQ ID NO: 10833 - RNA, 22 nt, synthetic construct
  source 1..22: mol_type = other RNA
gggtgagcgggctgacctctgg

SEQ ID NO: 10834 - RNA, 22 nt, synthetic construct
  source 1..22: mol_type = other RNA
ggtcagcccgctcacccgggac

SEQ ID NO: 10835 - RNA, 22 nt, synthetic construct
  source 1..22: mol_type = other RNA
ggtcagctgcggcctggaccgc

SEQ ID NO: 10836 - RNA, 22 nt, synthetic construct
  source 1..22: mol_type = other RNA
ggtccaggccgcagctgaccag

SEQ ID NO: 10837 - RNA, 22 nt, synthetic construct
  source 1..22: mol_type = other RNA
ggtccaggctgcccagccagtc

SEQ ID NO: 10838 - RNA, 22 nt, synthetic construct
  source 1..22: mol_type = other RNA
ggtcccgggtgagcgggctgac

SEQ ID NO: 10839 - RNA, 22 nt, synthetic construct
  source 1..22: mol_type = other RNA
ggtcgcacgtagaatagttggc

SEQ ID NO: 10840 - RNA, 22 nt, synthetic construct
  source 1..22: mol_type = other RNA
ggtcttgagctccgtgagctcc

SEQ ID NO: 10841 - RNA, 22 nt, synthetic construct
  source 1..22: mol_type = other RNA
ggtgagcgggctgacctctggc

SEQ ID NO: 10842 - RNA, 22 nt, synthetic construct
  source 1..22: mol_type = other RNA
ggtgcacgcccaggtggatgcc

SEQ ID NO: 10843 - RNA, 22 nt, synthetic construct
  source 1..22: mol_type = other RNA
ggtgcagcagggagcggtccag

SEQ ID NO: 10844 - RNA, 22 nt, synthetic construct
  source 1..22: mol_type = other RNA
ggtggatgccgcagtcttccag

SEQ ID NO: 10845 - RNA, 22 nt, synthetic construct
  source 1..22: mol_type = other RNA
ggtgtactggcggaagcgcggg

SEQ ID NO: 10846 - RNA, 22 nt, synthetic construct
  source 1..22: mol_type = other RNA
ggttgctgcggtcgcacgtaga

SEQ ID NO: 10847 - RNA, 22 nt, synthetic construct
  source 1..22: mol_type = other RNA
gtacacctacggcctggtcagc

SEQ ID NO: 10848 - RNA, 22 nt, synthetic construct
  source 1..22: mol_type = other RNA
gtactggcggaagcgcgggtcc

SEQ ID NO: 10849 - RNA, 22 nt, synthetic construct
  source 1..22: mol_type = other RNA
gtagaatagttggcgaaggtct

SEQ ID NO: 10850 - RNA, 22 nt, synthetic construct
  source 1..22: mol_type = other RNA
gtaggtgtactggcggaagcgc

SEQ ID NO: 10851 - RNA, 22 nt, synthetic construct
  source 1..22: mol_type = other RNA
gtcagcccgctcacccgggacc

SEQ ID NO: 10852 - RNA, 22 nt, synthetic construct
  source 1..22: mol_type = other RNA
gtcagctgcggcctggaccgct

SEQ ID NO: 10853 - RNA, 22 nt, synthetic construct
  source 1..22: mol_type = other RNA
gtccaggccgcagctgaccagg

SEQ ID NO: 10854 - RNA, 22 nt, synthetic construct
  source 1..22: mol_type = other RNA
gtccaggctgcccagccagtcc

SEQ ID NO: 10855 - RNA, 22 nt, synthetic construct
  source 1..22: mol_type = other RNA
gtcccgggtgagcgggctgacc

SEQ ID NO: 10856 - RNA, 22 nt, synthetic construct
  source 1..22: mol_type = other RNA
gtccgccaggttgctgcggtcg

SEQ ID NO: 10857 - RNA, 22 nt, synthetic construct
  source 1..22: mol_type = other RNA
gtcgcacgtagaatagttggcg

SEQ ID NO: 10858 - RNA, 22 nt, synthetic construct
  source 1..22: mol_type = other RNA
gtctgagcagcagctgctggaa

SEQ ID NO: 10859 - RNA, 22 nt, synthetic construct
  source 1..22: mol_type = other RNA
gtcttccagcagctgctgctca

SEQ ID NO: 10860 - RNA, 22 nt, synthetic construct
  source 1..22: mol_type = other RNA
gtcttgagctccgtgagctccc

SEQ ID NO: 10861 - RNA, 22 nt, synthetic construct
  source 1..22: mol_type = other RNA
gtgagcgggctgacctctggcc

SEQ ID NO: 10862 - RNA, 22 nt, synthetic construct
  source 1..22: mol_type = other RNA
gtgaggatgcgggcgcggtgca

SEQ ID NO: 10863 - RNA, 22 nt, synthetic construct
  source 1..22: mol_type = other RNA
gtgcaccgcgcccgcatcctca

SEQ ID NO: 10864 - RNA, 22 nt, synthetic construct
  source 1..22: mol_type = other RNA
gtgcacgcccaggtggatgccg

SEQ ID NO: 10865 - RNA, 22 nt, synthetic construct
  source 1..22: mol_type = other RNA
gtgcagcagggagcggtccagg

SEQ ID NO: 10866 - RNA, 22 nt, synthetic construct
  source 1..22: mol_type = other RNA
gtgcgaccgcagcaacctggcg

SEQ ID NO: 10867 - RNA, 22 nt, synthetic construct
  source 1..22: mol_type = other RNA
gtggatgccgcagtcttccagc

SEQ ID NO: 10868 - RNA, 22 nt, synthetic construct
  source 1..22: mol_type = other RNA
gtgtactggcggaagcgcgggt

SEQ ID NO: 10869 - RNA, 22 nt, synthetic construct
  source 1..22: mol_type = other RNA
gtgtctgagcagcagctgctgg

SEQ ID NO: 10870 - RNA, 22 nt, synthetic construct
  source 1..22: mol_type = other RNA
gttctttagggagctcacggag

SEQ ID NO: 10871 - RNA, 22 nt, synthetic construct
  source 1..22: mol_type = other RNA
gttgctgcggtcgcacgtagaa

SEQ ID NO: 10872 - RNA, 22 nt, synthetic construct
  source 1..22: mol_type = other RNA
gttggcgaaggtcttgagctcc

SEQ ID NO: 10873 - RNA, 22 nt, synthetic construct
  source 1..22: mol_type = other RNA
tacacctacggcctggtcagct

SEQ ID NO: 10874 - RNA, 22 nt, synthetic construct
  source 1..22: mol_type = other RNA
tacggcctggtcagctgcggcc

SEQ ID NO: 10875 - RNA, 22 nt, synthetic construct
  source 1..22: mol_type = other RNA
tacgtgcgaccgcagcaacctg

SEQ ID NO: 10876 - RNA, 22 nt, synthetic construct
  source 1..22: mol_type = other RNA
tactggcggaagcgcgggtcca

SEQ ID NO: 10877 - RNA, 22 nt, synthetic construct
  source 1..22: mol_type = other RNA
tagaatagttggcgaaggtctt

SEQ ID NO: 10878 - RNA, 22 nt, synthetic construct
  source 1..22: mol_type = other RNA
tagggagctcacggagctcaag

SEQ ID NO: 10879 - RNA, 22 nt, synthetic construct
  source 1..22: mol_type = other RNA
taggtgtactggcggaagcgcg

SEQ ID NO: 10880 - RNA, 22 nt, synthetic construct
  source 1..22: mol_type = other RNA
tagttggcgaaggtcttgagct

SEQ ID NO: 10881 - RNA, 22 nt, synthetic construct
  source 1..22: mol_type = other RNA
tattctacgtgcgaccgcagca

SEQ ID NO: 10882 - RNA, 22 nt, synthetic construct
  source 1..22: mol_type = other RNA
tcaagaccttcgccaactattc

SEQ ID NO: 10883 - RNA, 22 nt, synthetic construct
  source 1..22: mol_type = other RNA
tcacggagctcaagaccttcgc

SEQ ID NO: 10884 - RNA, 22 nt, synthetic construct
  source 1..22: mol_type = other RNA
tcacggcggccagaggtcagcc

SEQ ID NO: 10885 - RNA, 22 nt, synthetic construct
  source 1..22: mol_type = other RNA
tcagacacgcggtgcagcaggg

SEQ ID NO: 10886 - RNA, 22 nt, synthetic construct
  source 1..22: mol_type = other RNA
tcagctgcggcctggaccgctc

SEQ ID NO: 10887 - RNA, 22 nt, synthetic construct
  source 1..22: mol_type = other RNA
tccacctgggcgtgcaccgcgc

SEQ ID NO: 10888 - RNA, 22 nt, synthetic construct
  source 1..22: mol_type = other RNA
tccagcagctgctgctcagaca

SEQ ID NO: 10889 - RNA, 22 nt, synthetic construct
  source 1..22: mol_type = other RNA
tccaggccgcagctgaccaggc

SEQ ID NO: 10890 - RNA, 22 nt, synthetic construct
  source 1..22: mol_type = other RNA
tccaggctgcccagccagtccg

SEQ ID NO: 10891 - RNA, 22 nt, synthetic construct
  source 1..22: mol_type = other RNA
tcccgggtgagcgggctgacct

SEQ ID NO: 10892 - RNA, 22 nt, synthetic construct
  source 1..22: mol_type = other RNA
tccctgctgcaccgcgtgtctg

SEQ ID NO: 10893 - RNA, 22 nt, synthetic construct
  source 1..22: mol_type = other RNA
tccgccaggttgctgcggtcgc

SEQ ID NO: 10894 - RNA, 22 nt, synthetic construct
  source 1..22: mol_type = other RNA
tccgccagtacacctacggcct

SEQ ID NO: 10895 - RNA, 22 nt, synthetic construct
  source 1..22: mol_type = other RNA
tcctcacggcggccagaggtca

SEQ ID NO: 10896 - RNA, 22 nt, synthetic construct
  source 1..22: mol_type = other RNA
tcgcacgtagaatagttggcga

SEQ ID NO: 10897 - RNA, 22 nt, synthetic construct
  source 1..22: mol_type = other RNA
tcgccaactattctacgtgcga

SEQ ID NO: 10898 - RNA, 22 nt, synthetic construct
  source 1..22: mol_type = other RNA
tctacgtgcgaccgcagcaacc

SEQ ID NO: 10899 - RNA, 22 nt, synthetic construct
  source 1..22: mol_type = other RNA
tctgagcagcagctgctggaag

SEQ ID NO: 10900 - RNA, 22 nt, synthetic construct
  source 1..22: mol_type = other RNA
tctggccgccgtgaggatgcgg

SEQ ID NO: 10901 - RNA, 22 nt, synthetic construct
  source 1..22: mol_type = other RNA
tcttccagcagctgctgctcag

SEQ ID NO: 10902 - RNA, 22 nt, synthetic construct
  source 1..22: mol_type = other RNA
tctttagggagctcacggagct

SEQ ID NO: 10903 - RNA, 22 nt, synthetic construct
  source 1..22: mol_type = other RNA
tgaccaggccgtaggtgtactg

SEQ ID NO: 10904 - RNA, 22 nt, synthetic construct
  source 1..22: mol_type = other RNA
tgacctctggccgccgtgagga

SEQ ID NO: 10905 - RNA, 22 nt, synthetic construct
  source 1..22: mol_type = other RNA
tgagcagcagctgctggaagac

SEQ ID NO: 10906 - RNA, 22 nt, synthetic construct
  source 1..22: mol_type = other RNA
tgagcgggctgacctctggccg

SEQ ID NO: 10907 - RNA, 22 nt, synthetic construct
  source 1..22: mol_type = other RNA
tgaggatgcgggcgcggtgcac

SEQ ID NO: 10908 - RNA, 22 nt, synthetic construct
  source 1..22: mol_type = other RNA
tgcaccgcgcccgcatcctcac

SEQ ID NO: 10909 - RNA, 22 nt, synthetic construct
  source 1..22: mol_type = other RNA
tgcaccgcgtgtctgagcagca

SEQ ID NO: 10910 - RNA, 22 nt, synthetic construct
  source 1..22: mol_type = other RNA
tgcacgcccaggtggatgccgc

SEQ ID NO: 10911 - RNA, 22 nt, synthetic construct
  source 1..22: mol_type = other RNA
tgcagcagggagcggtccaggc

SEQ ID NO: 10912 - RNA, 22 nt, synthetic construct
  source 1..22: mol_type = other RNA
tgcccagccagtccgccaggtt

SEQ ID NO: 10913 - RNA, 22 nt, synthetic construct
  source 1..22: mol_type = other RNA
tgccgcagtcttccagcagctg

SEQ ID NO: 10914 - RNA, 22 nt, synthetic construct
  source 1..22: mol_type = other RNA
tgcgaccgcagcaacctggcgg

SEQ ID NO: 10915 - RNA, 22 nt, synthetic construct
  source 1..22: mol_type = other RNA
tgcggcatccacctgggcgtgc

SEQ ID NO: 10916 - RNA, 22 nt, synthetic construct
  source 1..22: mol_type = other RNA
tgcggcctggaccgctccctgc

SEQ ID NO: 10917 - RNA, 22 nt, synthetic construct
  source 1..22: mol_type = other RNA
tgcgggcgcggtgcacgcccag

SEQ ID NO: 10918 - RNA, 22 nt, synthetic construct
  source 1..22: mol_type = other RNA
tgcggtcgcacgtagaatagtt

SEQ ID NO: 10919 - RNA, 22 nt, synthetic construct
  source 1..22: mol_type = other RNA
tgctcagacacgcggtgcagca

SEQ ID NO: 10920 - RNA, 22 nt, synthetic construct
  source 1..22: mol_type = other RNA
tgctgcaccgcgtgtctgagca

SEQ ID NO: 10921 - RNA, 22 nt, synthetic construct
  source 1..22: mol_type = other RNA
tgctgcggtcgcacgtagaata

SEQ ID NO: 10922 - RNA, 22 nt, synthetic construct
  source 1..22: mol_type = other RNA
tgctgctcagacacgcggtgca

SEQ ID NO: 10923 - RNA, 22 nt, synthetic construct
  source 1..22: mol_type = other RNA
tgctggaagactgcggcatcca

SEQ ID NO: 10924 - RNA, 22 nt, synthetic construct
  source 1..22: mol_type = other RNA
tggaagactgcggcatccacct

SEQ ID NO: 10925 - RNA, 22 nt, synthetic construct
  source 1..22: mol_type = other RNA
tggacccgcgcttccgccagta

SEQ ID NO: 10926 - RNA, 22 nt, synthetic construct
  source 1..22: mol_type = other RNA
tggaccgctccctgctgcaccg

SEQ ID NO: 10927 - RNA, 22 nt, synthetic construct
  source 1..22: mol_type = other RNA
tggatgccgcagtcttccagca

SEQ ID NO: 10928 - RNA, 22 nt, synthetic construct
  source 1..22: mol_type = other RNA
tggccgccgtgaggatgcgggc

SEQ ID NO: 10929 - RNA, 22 nt, synthetic construct
  source 1..22: mol_type = other RNA
tggcgaaggtcttgagctccgt

SEQ ID NO: 10930 - RNA, 22 nt, synthetic construct
  source 1..22: mol_type = other RNA
tggcggaagcgcgggtccaggc

SEQ ID NO: 10931 - RNA, 22 nt, synthetic construct
  source 1..22: mol_type = other RNA
tggcggactggctgggcagcct

SEQ ID NO: 10932 - RNA, 22 nt, synthetic construct
  source 1..22: mol_type = other RNA
tggctgggcagcctggacccgc

SEQ ID NO: 10933 - RNA, 22 nt, synthetic construct
  source 1..22: mol_type = other RNA
tgggcagcctggacccgcgctt

SEQ ID NO: 10934 - RNA, 22 nt, synthetic construct
  source 1..22: mol_type = other RNA
tgggcgtgcaccgcgcccgcat

SEQ ID NO: 10935 - RNA, 22 nt, synthetic construct
  source 1..22: mol_type = other RNA
tggggcggggtcccgggtgagc

SEQ ID NO: 10936 - RNA, 22 nt, synthetic construct
  source 1..22: mol_type = other RNA
tggtcagctgcggcctggaccg

SEQ ID NO: 10937 - RNA, 22 nt, synthetic construct
  source 1..22: mol_type = other RNA
tgtactggcggaagcgcgggtc

SEQ ID NO: 10938 - RNA, 22 nt, synthetic construct
  source 1..22: mol_type = other RNA
tgtctgagcagcagctgctgga

SEQ ID NO: 10939 - RNA, 22 nt, synthetic construct
  source 1..22: mol_type = other RNA
ttagggagctcacggagctcaa

SEQ ID NO: 10940 - RNA, 22 nt, synthetic construct
  source 1..22: mol_type = other RNA
ttccagcagctgctgctcagac

SEQ ID NO: 10941 - RNA, 22 nt, synthetic construct
  source 1..22: mol_type = other RNA
ttccgccagtacacctacggcc

SEQ ID NO: 10942 - RNA, 22 nt, synthetic construct
  source 1..22: mol_type = other RNA
ttcgccaactattctacgtgcg

SEQ ID NO: 10943 - RNA, 22 nt, synthetic construct
  source 1..22: mol_type = other RNA
ttctacgtgcgaccgcagcaac

SEQ ID NO: 10944 - RNA, 22 nt, synthetic construct
  source 1..22: mol_type = other RNA
ttctttagggagctcacggagc

SEQ ID NO: 10945 - RNA, 22 nt, synthetic construct
  source 1..22: mol_type = other RNA
ttgctgcggtcgcacgtagaat

SEQ ID NO: 10946 - RNA, 22 nt, synthetic construct
  source 1..22: mol_type = other RNA
ttggcgaaggtcttgagctccg

SEQ ID NO: 10947 - RNA, 22 nt, synthetic construct
  source 1..22: mol_type = other RNA
tttagggagctcacggagctca

SEQ ID NO: 10948 - RNA, 20 nt, synthetic construct
  source 1..20: mol_type = other RNA
aaacccagtggggacactcc

SEQ ID NO: 10949 - RNA, 20 nt, synthetic construct
  source 1..20: mol_type = other RNA
aaatgctacactccccgctg

SEQ ID NO: 10950 - RNA, 20 nt, synthetic construct
  source 1..20: mol_type = other RNA
aacccagtggggacactcca

SEQ ID NO: 10951 - RNA, 20 nt, synthetic construct
  source 1..20: mol_type = other RNA
aacctgagttccggcggtag

SEQ ID NO: 10952 - RNA, 20 nt, synthetic construct
  source 1..20: mol_type = other RNA
aactcaggttcccagctggc

SEQ ID NO: 10953 - RNA, 20 nt, synthetic construct
  source 1..20: mol_type = other RNA
aagacatctggagtgtcccc

SEQ ID NO: 10954 - RNA, 20 nt, synthetic construct
  source 1..20: mol_type = other RNA
aatgctacactccccgctgc

SEQ ID NO: 10955 - RNA, 20 nt, synthetic construct
  source 1..20: mol_type = other RNA
acactccagatgtcttcatc

SEQ ID NO: 10956 - RNA, 20 nt, synthetic construct
  source 1..20: mol_type = other RNA
acactccccgctgccctgta

SEQ ID NO: 10957 - RNA, 20 nt, synthetic construct
  source 1..20: mol_type = other RNA
acatctggagtgtccccact

SEQ ID NO: 10958 - RNA, 20 nt, synthetic construct
  source 1..20: mol_type = other RNA
accagtacagggcagcgggg

SEQ ID NO: 10959 - RNA, 20 nt, synthetic construct
  source 1..20: mol_type = other RNA
acccagtggggacactccag

SEQ ID NO: 10960 - RNA, 20 nt, synthetic construct
  source 1..20: mol_type = other RNA
accgccggaactcaggttcc

SEQ ID NO: 10961 - RNA, 20 nt, synthetic construct
  source 1..20: mol_type = other RNA
acctgagttccggcggtagc

SEQ ID NO: 10962 - RNA, 20 nt, synthetic construct
  source 1..20: mol_type = other RNA
acctggccagctgggaacct

SEQ ID NO: 10963 - RNA, 20 nt, synthetic construct
  source 1..20: mol_type = other RNA
actcaggttcccagctggcc

SEQ ID NO: 10964 - RNA, 20 nt, synthetic construct
  source 1..20: mol_type = other RNA
actccagatgtcttcatcag

SEQ ID NO: 10965 - RNA, 20 nt, synthetic construct
  source 1..20: mol_type = other RNA
actccccgctgccctgtact

SEQ ID NO: 10966 - RNA, 20 nt, synthetic construct
  source 1..20: mol_type = other RNA
actgggtttgccaccagtac

SEQ ID NO: 10967 - RNA, 20 nt, synthetic construct
  source 1..20: mol_type = other RNA
actggtggcaaacccagtgg

SEQ ID NO: 10968 - RNA, 20 nt, synthetic construct
  source 1..20: mol_type = other RNA
agacatctggagtgtcccca

SEQ ID NO: 10969 - RNA, 20 nt, synthetic construct
  source 1..20: mol_type = other RNA
agatgtcttcatcagctacc

SEQ ID NO: 10970 - RNA, 20 nt, synthetic construct
  source 1..20: mol_type = other RNA
agctaccgccggaactcagg

SEQ ID NO: 10971 - RNA, 20 nt, synthetic construct
  source 1..20: mol_type = other RNA
agctgatgaagacatctgga

SEQ ID NO: 10972 - RNA, 20 nt, synthetic construct
  source 1..20: mol_type = other RNA
agctggccaggtgaggaggg

SEQ ID NO: 10973 - RNA, 20 nt, synthetic construct
  source 1..20: mol_type = other RNA
agctgggaacctgagttccg

SEQ ID NO: 10974 - RNA, 20 nt, synthetic construct
  source 1..20: mol_type = other RNA
aggtgaggaggggcgggcgg

SEQ ID NO: 10975 - RNA, 20 nt, synthetic construct
  source 1..20: mol_type = other RNA
aggttcccagctggccaggt

SEQ ID NO: 10976 - RNA, 20 nt, synthetic construct
  source 1..20: mol_type = other RNA
agtacagggcagcggggagt

SEQ ID NO: 10977 - RNA, 20 nt, synthetic construct
  source 1..20: mol_type = other RNA
agtggggacactccagatgt

SEQ ID NO: 10978 - RNA, 20 nt, synthetic construct
  source 1..20: mol_type = other RNA
agtgtccccactgggtttgc

SEQ ID NO: 10979 - RNA, 20 nt, synthetic construct
  source 1..20: mol_type = other RNA
agttccggcggtagctgatg

SEQ ID NO: 10980 - RNA, 20 nt, synthetic construct
  source 1..20: mol_type = other RNA
atcagctaccgccggaactc

SEQ ID NO: 10981 - RNA, 20 nt, synthetic construct
  source 1..20: mol_type = other RNA
atctggagtgtccccactgg

SEQ ID NO: 10982 - RNA, 20 nt, synthetic construct
  source 1..20: mol_type = other RNA
atgaagacatctggagtgtc

SEQ ID NO: 10983 - RNA, 20 nt, synthetic construct
  source 1..20: mol_type = other RNA
atgctacactccccgctgcc

SEQ ID NO: 10984 - RNA, 20 nt, synthetic construct
  source 1..20: mol_type = other RNA
atgtcttcatcagctaccgc

SEQ ID NO: 10985 - RNA, 20 nt, synthetic construct
  source 1..20: mol_type = other RNA
caaacccagtggggacactc

SEQ ID NO: 10986 - RNA, 20 nt, synthetic construct
  source 1..20: mol_type = other RNA
caccagtacagggcagcggg

SEQ ID NO: 10987 - RNA, 20 nt, synthetic construct
  source 1..20: mol_type = other RNA
cacctggccagctgggaacc

SEQ ID NO: 10988 - RNA, 20 nt, synthetic construct
  source 1..20: mol_type = other RNA
cactccagatgtcttcatca

SEQ ID NO: 10989 - RNA, 20 nt, synthetic construct
  source 1..20: mol_type = other RNA
cactccccgctgccctgtac

SEQ ID NO: 10990 - RNA, 20 nt, synthetic construct
  source 1..20: mol_type = other RNA
cactgggtttgccaccagta

SEQ ID NO: 10991 - RNA, 20 nt, synthetic construct
  source 1..20: mol_type = other RNA
cagatgtcttcatcagctac

SEQ ID NO: 10992 - RNA, 20 nt, synthetic construct
  source 1..20: mol_type = other RNA
cagctaccgccggaactcag

SEQ ID NO: 10993 - RNA, 20 nt, synthetic construct
  source 1..20: mol_type = other RNA
cagctggccaggtgaggagg

SEQ ID NO: 10994 - RNA, 20 nt, synthetic construct
  source 1..20: mol_type = other RNA
cagctgggaacctgagttcc

SEQ ID NO: 10995 - RNA, 20 nt, synthetic construct
  source 1..20: mol_type = other RNA
caggtgaggaggggcgggcg

SEQ ID NO: 10996 - RNA, 20 nt, synthetic construct
  source 1..20: mol_type = other RNA
caggttcccagctggccagg

SEQ ID NO: 10997 - RNA, 20 nt, synthetic construct
  source 1..20: mol_type = other RNA
cagtacagggcagcggggag

SEQ ID NO: 10998 - RNA, 20 nt, synthetic construct
  source 1..20: mol_type = other RNA
cagtggggacactccagatg

SEQ ID NO: 10999 - RNA, 20 nt, synthetic construct
  source 1..20: mol_type = other RNA
catcagctaccgccggaact

SEQ ID NO: 11000 - RNA, 20 nt, synthetic construct
  source 1..20: mol_type = other RNA
catctggagtgtccccactg

SEQ ID NO: 11001 - RNA, 20 nt, synthetic construct
  source 1..20: mol_type = other RNA
ccaccagtacagggcagcgg

SEQ ID NO: 11002 - RNA, 20 nt, synthetic construct
  source 1..20: mol_type = other RNA
ccactgggtttgccaccagt

SEQ ID NO: 11003 - RNA, 20 nt, synthetic construct
  source 1..20: mol_type = other RNA
ccagatgtcttcatcagcta

SEQ ID NO: 11004 - RNA, 20 nt, synthetic construct
  source 1..20: mol_type = other RNA
ccagctggccaggtgaggag

SEQ ID NO: 11005 - RNA, 20 nt, synthetic construct
  source 1..20: mol_type = other RNA
ccagctgggaacctgagttc

SEQ ID NO: 11006 - RNA, 20 nt, synthetic construct
  source 1..20: mol_type = other RNA
ccaggtgaggaggggcgggc

SEQ ID NO: 11007 - RNA, 20 nt, synthetic construct
  source 1..20: mol_type = other RNA
ccagtacagggcagcgggga

SEQ ID NO: 11008 - RNA, 20 nt, synthetic construct
  source 1..20: mol_type = other RNA
ccagtggggacactccagat

SEQ ID NO: 11009 - RNA, 20 nt, synthetic construct
  source 1..20: mol_type = other RNA
cccactgggtttgccaccag

SEQ ID NO: 11010 - RNA, 20 nt, synthetic construct
  source 1..20: mol_type = other RNA
cccagctggccaggtgagga

SEQ ID NO: 11011 - RNA, 20 nt, synthetic construct
  source 1..20: mol_type = other RNA
cccagtggggacactccaga

SEQ ID NO: 11012 - RNA, 20 nt, synthetic construct
  source 1..20: mol_type = other RNA
ccccactgggtttgccacca

SEQ ID NO: 11013 - RNA, 20 nt, synthetic construct
  source 1..20: mol_type = other RNA
ccccgctgccctgtactggt

SEQ ID NO: 11014 - RNA, 20 nt, synthetic construct
  source 1..20: mol_type = other RNA
cccctcctcacctggccagc

SEQ ID NO: 11015 - RNA, 20 nt, synthetic construct
  source 1..20: mol_type = other RNA
cccgcccctcctcacctggc

SEQ ID NO: 11016 - RNA, 20 nt, synthetic construct
  source 1..20: mol_type = other RNA
cccgcccgcccctcctcacc

SEQ ID NO: 11017 - RNA, 20 nt, synthetic construct
  source 1..20: mol_type = other RNA
cccgctgccctgtactggtg

SEQ ID NO: 11018 - RNA, 20 nt, synthetic construct
  source 1..20: mol_type = other RNA
ccctcctcacctggccagct

SEQ ID NO: 11019 - RNA, 20 nt, synthetic construct
  source 1..20: mol_type = other RNA
ccctgtactggtggcaaacc

SEQ ID NO: 11020 - RNA, 20 nt, synthetic construct
  source 1..20: mol_type = other RNA
ccgcccctcctcacctggcc

SEQ ID NO: 11021 - RNA, 20 nt, synthetic construct
  source 1..20: mol_type = other RNA
ccgcccgcccctcctcacct

SEQ ID NO: 11022 - RNA, 20 nt, synthetic construct
  source 1..20: mol_type = other RNA
ccgccggaactcaggttccc

SEQ ID NO: 11023 - RNA, 20 nt, synthetic construct
  source 1..20: mol_type = other RNA
ccgctgccctgtactggtgg

SEQ ID NO: 11024 - RNA, 20 nt, synthetic construct
  source 1..20: mol_type = other RNA
ccggaactcaggttcccagc

SEQ ID NO: 11025 - RNA, 20 nt, synthetic construct
  source 1..20: mol_type = other RNA
ccggcggtagctgatgaaga

SEQ ID NO: 11026 - RNA, 20 nt, synthetic construct
  source 1..20: mol_type = other RNA
ccgtcgctgcccgcccgccc

SEQ ID NO: 11027 - RNA, 20 nt, synthetic construct
  source 1..20: mol_type = other RNA
cctcacctggccagctggga

SEQ ID NO: 11028 - RNA, 20 nt, synthetic construct
  source 1..20: mol_type = other RNA
cctcctcacctggccagctg

SEQ ID NO: 11029 - RNA, 20 nt, synthetic construct
  source 1..20: mol_type = other RNA
cctgagttccggcggtagct

SEQ ID NO: 11030 - RNA, 20 nt, synthetic construct
  source 1..20: mol_type = other RNA
cctggccagctgggaacctg

SEQ ID NO: 11031 - RNA, 20 nt, synthetic construct
  source 1..20: mol_type = other RNA
cctgtactggtggcaaaccc

SEQ ID NO: 11032 - RNA, 20 nt, synthetic construct
  source 1..20: mol_type = other RNA
cgcccctcctcacctggcca

SEQ ID NO: 11033 - RNA, 20 nt, synthetic construct
  source 1..20: mol_type = other RNA
cgcccgcccctcctcacctg

SEQ ID NO: 11034 - RNA, 20 nt, synthetic construct
  source 1..20: mol_type = other RNA
cgccggaactcaggttccca

SEQ ID NO: 11035 - RNA, 20 nt, synthetic construct
  source 1..20: mol_type = other RNA
cgctgcccgcccgcccctcc

SEQ ID NO: 11036 - RNA, 20 nt, synthetic construct
  source 1..20: mol_type = other RNA
cgctgccctgtactggtggc

SEQ ID NO: 11037 - RNA, 20 nt, synthetic construct
  source 1..20: mol_type = other RNA
cggaactcaggttcccagct

SEQ ID NO: 11038 - RNA, 20 nt, synthetic construct
  source 1..20: mol_type = other RNA
cggcggtagctgatgaagac

SEQ ID NO: 11039 - RNA, 20 nt, synthetic construct
  source 1..20: mol_type = other RNA
cggtagctgatgaagacatc

SEQ ID NO: 11040 - RNA, 20 nt, synthetic construct
  source 1..20: mol_type = other RNA
cgtcgctgcccgcccgcccc

SEQ ID NO: 11041 - RNA, 20 nt, synthetic construct
  source 1..20: mol_type = other RNA
ctacactccccgctgccctg

SEQ ID NO: 11042 - RNA, 20 nt, synthetic construct
  source 1..20: mol_type = other RNA
ctaccgccggaactcaggtt

SEQ ID NO: 11043 - RNA, 20 nt, synthetic construct
  source 1..20: mol_type = other RNA
ctcacctggccagctgggaa

SEQ ID NO: 11044 - RNA, 20 nt, synthetic construct
  source 1..20: mol_type = other RNA
ctcaggttcccagctggcca

SEQ ID NO: 11045 - RNA, 20 nt, synthetic construct
  source 1..20: mol_type = other RNA
ctccagatgtcttcatcagc

SEQ ID NO: 11046 - RNA, 20 nt, synthetic construct
  source 1..20: mol_type = other RNA
ctccccgctgccctgtactg

SEQ ID NO: 11047 - RNA, 20 nt, synthetic construct
  source 1..20: mol_type = other RNA
ctcctcacctggccagctgg

SEQ ID NO: 11048 - RNA, 20 nt, synthetic construct
  source 1..20: mol_type = other RNA
ctgagttccggcggtagctg

SEQ ID NO: 11049 - RNA, 20 nt, synthetic construct
  source 1..20: mol_type = other RNA
ctgatgaagacatctggagt

SEQ ID NO: 11050 - RNA, 20 nt, synthetic construct
  source 1..20: mol_type = other RNA
ctgcccgcccgcccctcctc

SEQ ID NO: 11051 - RNA, 20 nt, synthetic construct
  source 1..20: mol_type = other RNA
ctgccctgtactggtggcaa

SEQ ID NO: 11052 - RNA, 20 nt, synthetic construct
  source 1..20: mol_type = other RNA
ctggagtgtccccactgggt

SEQ ID NO: 11053 - RNA, 20 nt, synthetic construct
  source 1..20: mol_type = other RNA
ctggccagctgggaacctga

SEQ ID NO: 11054 - RNA, 20 nt, synthetic construct
  source 1..20: mol_type = other RNA
ctggccaggtgaggaggggc

SEQ ID NO: 11055 - RNA, 20 nt, synthetic construct
  source 1..20: mol_type = other RNA
ctgggaacctgagttccggc

SEQ ID NO: 11056 - RNA, 20 nt, synthetic construct
  source 1..20: mol_type = other RNA
ctgggtttgccaccagtaca

SEQ ID NO: 11057 - RNA, 20 nt, synthetic construct
  source 1..20: mol_type = other RNA
ctggtggcaaacccagtggg

SEQ ID NO: 11058 - RNA, 20 nt, synthetic construct
  source 1..20: mol_type = other RNA
ctgtactggtggcaaaccca

SEQ ID NO: 11059 - RNA, 20 nt, synthetic construct
  source 1..20: mol_type = other RNA
cttcatcagctaccgccgga

SEQ ID NO: 11060 - RNA, 20 nt, synthetic construct
  source 1..20: mol_type = other RNA
gaacctgagttccggcggta

SEQ ID NO: 11061 - RNA, 20 nt, synthetic construct
  source 1..20: mol_type = other RNA
gaactcaggttcccagctgg

SEQ ID NO: 11062 - RNA, 20 nt, synthetic construct
  source 1..20: mol_type = other RNA
gaagacatctggagtgtccc

SEQ ID NO: 11063 - RNA, 20 nt, synthetic construct
  source 1..20: mol_type = other RNA
gacactccagatgtcttcat

SEQ ID NO: 11064 - RNA, 20 nt, synthetic construct
  source 1..20: mol_type = other RNA
gacatctggagtgtccccac

SEQ ID NO: 11065 - RNA, 20 nt, synthetic construct
  source 1..20: mol_type = other RNA
gagtgtccccactgggtttg

SEQ ID NO: 11066 - RNA, 20 nt, synthetic construct
  source 1..20: mol_type = other RNA
gagttccggcggtagctgat

SEQ ID NO: 11067 - RNA, 20 nt, synthetic construct
  source 1..20: mol_type = other RNA
gatgaagacatctggagtgt

SEQ ID NO: 11068 - RNA, 20 nt, synthetic construct
  source 1..20: mol_type = other RNA
gatgtcttcatcagctaccg

SEQ ID NO: 11069 - RNA, 20 nt, synthetic construct
  source 1..20: mol_type = other RNA
gcaaacccagtggggacact

SEQ ID NO: 11070 - RNA, 20 nt, synthetic construct
  source 1..20: mol_type = other RNA
gccaccagtacagggcagcg

SEQ ID NO: 11071 - RNA, 20 nt, synthetic construct
  source 1..20: mol_type = other RNA
gccagctgggaacctgagtt

SEQ ID NO: 11072 - RNA, 20 nt, synthetic construct
  source 1..20: mol_type = other RNA
gccaggtgaggaggggcggg

SEQ ID NO: 11073 - RNA, 20 nt, synthetic construct
  source 1..20: mol_type = other RNA
gcccctcctcacctggccag

SEQ ID NO: 11074 - RNA, 20 nt, synthetic construct
  source 1..20: mol_type = other RNA
gcccgcccctcctcacctgg

SEQ ID NO: 11075 - RNA, 20 nt, synthetic construct
  source 1..20: mol_type = other RNA
gcccgcccgcccctcctcac

SEQ ID NO: 11076 - RNA, 20 nt, synthetic construct
  source 1..20: mol_type = other RNA
gccctgtactggtggcaaac

SEQ ID NO: 11077 - RNA, 20 nt, synthetic construct
  source 1..20: mol_type = other RNA
gccggaactcaggttcccag

SEQ ID NO: 11078 - RNA, 20 nt, synthetic construct
  source 1..20: mol_type = other RNA
gcggtagctgatgaagacat

SEQ ID NO: 11079 - RNA, 20 nt, synthetic construct
  source 1..20: mol_type = other RNA
gctacactccccgctgccct

SEQ ID NO: 11080 - RNA, 20 nt, synthetic construct
  source 1..20: mol_type = other RNA
gctaccgccggaactcaggt

SEQ ID NO: 11081 - RNA, 20 nt, synthetic construct
  source 1..20: mol_type = other RNA
gctgatgaagacatctggag

SEQ ID NO: 11082 - RNA, 20 nt, synthetic construct
  source 1..20: mol_type = other RNA
gctgcccgcccgcccctcct

SEQ ID NO: 11083 - RNA, 20 nt, synthetic construct
  source 1..20: mol_type = other RNA
gctgccctgtactggtggca

SEQ ID NO: 11084 - RNA, 20 nt, synthetic construct
  source 1..20: mol_type = other RNA
gctggccaggtgaggagggg

SEQ ID NO: 11085 - RNA, 20 nt, synthetic construct
  source 1..20: mol_type = other RNA
gctgggaacctgagttccgg

SEQ ID NO: 11086 - RNA, 20 nt, synthetic construct
  source 1..20: mol_type = other RNA
ggaacctgagttccggcggt

SEQ ID NO: 11087 - RNA, 20 nt, synthetic construct
  source 1..20: mol_type = other RNA
ggaactcaggttcccagctg

SEQ ID NO: 11088 - RNA, 20 nt, synthetic construct
  source 1..20: mol_type = other RNA
ggacactccagatgtcttca

SEQ ID NO: 11089 - RNA, 20 nt, synthetic construct
  source 1..20: mol_type = other RNA
ggagtgtccccactgggttt

SEQ ID NO: 11090 - RNA, 20 nt, synthetic construct
  source 1..20: mol_type = other RNA
ggcaaacccagtggggacac

SEQ ID NO: 11091 - RNA, 20 nt, synthetic construct
  source 1..20: mol_type = other RNA
ggccagctgggaacctgagt

SEQ ID NO: 11092 - RNA, 20 nt, synthetic construct
  source 1..20: mol_type = other RNA
ggccaggtgaggaggggcgg

SEQ ID NO: 11093 - RNA, 20 nt, synthetic construct
  source 1..20: mol_type = other RNA
ggcggtagctgatgaagaca

SEQ ID NO: 11094 - RNA, 20 nt, synthetic construct
  source 1..20: mol_type = other RNA
gggaacctgagttccggcgg

SEQ ID NO: 11095 - RNA, 20 nt, synthetic construct
  source 1..20: mol_type = other RNA
gggacactccagatgtcttc

SEQ ID NO: 11096 - RNA, 20 nt, synthetic construct
  source 1..20: mol_type = other RNA
ggggacactccagatgtctt

SEQ ID NO: 11097 - RNA, 20 nt, synthetic construct
  source 1..20: mol_type = other RNA
gggtttgccaccagtacagg

SEQ ID NO: 11098 - RNA, 20 nt, synthetic construct
  source 1..20: mol_type = other RNA
ggtagctgatgaagacatct

SEQ ID NO: 11099 - RNA, 20 nt, synthetic construct
  source 1..20: mol_type = other RNA
ggtgaggaggggcgggcggg

SEQ ID NO: 11100 - RNA, 20 nt, synthetic construct
  source 1..20: mol_type = other RNA
ggtggcaaacccagtgggga

SEQ ID NO: 11101 - RNA, 20 nt, synthetic construct
  source 1..20: mol_type = other RNA
ggttcccagctggccaggtg

SEQ ID NO: 11102 - RNA, 20 nt, synthetic construct
  source 1..20: mol_type = other RNA
ggtttgccaccagtacaggg

SEQ ID NO: 11103 - RNA, 20 nt, synthetic construct
  source 1..20: mol_type = other RNA
gtacagggcagcggggagtg

SEQ ID NO: 11104 - RNA, 20 nt, synthetic construct
  source 1..20: mol_type = other RNA
gtactggtggcaaacccagt

SEQ ID NO: 11105 - RNA, 20 nt, synthetic construct
  source 1..20: mol_type = other RNA
gtagctgatgaagacatctg

SEQ ID NO: 11106 - RNA, 20 nt, synthetic construct
  source 1..20: mol_type = other RNA
gtccccactgggtttgccac

SEQ ID NO: 11107 - RNA, 20 nt, synthetic construct
  source 1..20: mol_type = other RNA
gtcgctgcccgcccgcccct

SEQ ID NO: 11108 - RNA, 20 nt, synthetic construct
  source 1..20: mol_type = other RNA
gtcttcatcagctaccgccg

SEQ ID NO: 11109 - RNA, 20 nt, synthetic construct
  source 1..20: mol_type = other RNA
gtgaggaggggcgggcgggc

SEQ ID NO: 11110 - RNA, 20 nt, synthetic construct
  source 1..20: mol_type = other RNA
gtggcaaacccagtggggac

SEQ ID NO: 11111 - RNA, 20 nt, synthetic construct
  source 1..20: mol_type = other RNA
gtggggacactccagatgtc

SEQ ID NO: 11112 - RNA, 20 nt, synthetic construct
  source 1..20: mol_type = other RNA
gtgtccccactgggtttgcc

SEQ ID NO: 11113 - RNA, 20 nt, synthetic construct
  source 1..20: mol_type = other RNA
gttcccagctggccaggtga

SEQ ID NO: 11114 - RNA, 20 nt, synthetic construct
  source 1..20: mol_type = other RNA
gttccggcggtagctgatga

SEQ ID NO: 11115 - RNA, 20 nt, synthetic construct
  source 1..20: mol_type = other RNA
gtttgccaccagtacagggc

SEQ ID NO: 11116 - RNA, 20 nt, synthetic construct
  source 1..20: mol_type = other RNA
tacactccccgctgccctgt

SEQ ID NO: 11117 - RNA, 20 nt, synthetic construct
  source 1..20: mol_type = other RNA
taccgccggaactcaggttc

SEQ ID NO: 11118 - RNA, 20 nt, synthetic construct
  source 1..20: mol_type = other RNA
tactggtggcaaacccagtg

SEQ ID NO: 11119 - RNA, 20 nt, synthetic construct
  source 1..20: mol_type = other RNA
tagctgatgaagacatctgg

SEQ ID NO: 11120 - RNA, 20 nt, synthetic construct
  source 1..20: mol_type = other RNA
tcacctggccagctgggaac

SEQ ID NO: 11121 - RNA, 20 nt, synthetic construct
  source 1..20: mol_type = other RNA
tcagctaccgccggaactca

SEQ ID NO: 11122 - RNA, 20 nt, synthetic construct
  source 1..20: mol_type = other RNA
tcaggttcccagctggccag

SEQ ID NO: 11123 - RNA, 20 nt, synthetic construct
  source 1..20: mol_type = other RNA
tcatcagctaccgccggaac

SEQ ID NO: 11124 - RNA, 20 nt, synthetic construct
  source 1..20: mol_type = other RNA
tccagatgtcttcatcagct

SEQ ID NO: 11125 - RNA, 20 nt, synthetic construct
  source 1..20: mol_type = other RNA
tcccagctggccaggtgagg

SEQ ID NO: 11126 - RNA, 20 nt, synthetic construct
  source 1..20: mol_type = other RNA
tccccactgggtttgccacc

SEQ ID NO: 11127 - RNA, 20 nt, synthetic construct
  source 1..20: mol_type = other RNA
tccccgctgccctgtactgg

SEQ ID NO: 11128 - RNA, 20 nt, synthetic construct
  source 1..20: mol_type = other RNA
tccggcggtagctgatgaag

SEQ ID NO: 11129 - RNA, 20 nt, synthetic construct
  source 1..20: mol_type = other RNA
tcctcacctggccagctggg

SEQ ID NO: 11130 - RNA, 20 nt, synthetic construct
  source 1..20: mol_type = other RNA
tcgctgcccgcccgcccctc

SEQ ID NO: 11131 - RNA, 20 nt, synthetic construct
  source 1..20: mol_type = other RNA
tctggagtgtccccactggg

SEQ ID NO: 11132 - RNA, 20 nt, synthetic construct
  source 1..20: mol_type = other RNA
tcttcatcagctaccgccgg

SEQ ID NO: 11133 - RNA, 20 nt, synthetic construct
  source 1..20: mol_type = other RNA
tgaagacatctggagtgtcc

SEQ ID NO: 11134 - RNA, 20 nt, synthetic construct
  source 1..20: mol_type = other RNA
tgagttccggcggtagctga

SEQ ID NO: 11135 - RNA, 20 nt, synthetic construct
  source 1..20: mol_type = other RNA
tgatgaagacatctggagtg

SEQ ID NO: 11136 - RNA, 20 nt, synthetic construct
  source 1..20: mol_type = other RNA
tgccaccagtacagggcagc

SEQ ID NO: 11137 - RNA, 20 nt, synthetic construct
  source 1..20: mol_type = other RNA
tgcccgcccgcccctcctca

SEQ ID NO: 11138 - RNA, 20 nt, synthetic construct
  source 1..20: mol_type = other RNA
tgccctgtactggtggcaaa

SEQ ID NO: 11139 - RNA, 20 nt, synthetic construct
  source 1..20: mol_type = other RNA
tgctacactccccgctgccc

SEQ ID NO: 11140 - RNA, 20 nt, synthetic construct
  source 1..20: mol_type = other RNA
tggagtgtccccactgggtt

SEQ ID NO: 11141 - RNA, 20 nt, synthetic construct
  source 1..20: mol_type = other RNA
tggcaaacccagtggggaca

SEQ ID NO: 11142 - RNA, 20 nt, synthetic construct
  source 1..20: mol_type = other RNA
tggccagctgggaacctgag

SEQ ID NO: 11143 - RNA, 20 nt, synthetic construct
  source 1..20: mol_type = other RNA
tggccaggtgaggaggggcg

SEQ ID NO: 11144 - RNA, 20 nt, synthetic construct
  source 1..20: mol_type = other RNA
tgggaacctgagttccggcg

SEQ ID NO: 11145 - RNA, 20 nt, synthetic construct
  source 1..20: mol_type = other RNA
tggggacactccagatgtct

SEQ ID NO: 11146 - RNA, 20 nt, synthetic construct
  source 1..20: mol_type = other RNA
tgggtttgccaccagtacag

SEQ ID NO: 11147 - RNA, 20 nt, synthetic construct
  source 1..20: mol_type = other RNA
tggtggcaaacccagtgggg

SEQ ID NO: 11148 - RNA, 20 nt, synthetic construct
  source 1..20: mol_type = other RNA
tgtactggtggcaaacccag

SEQ ID NO: 11149 - RNA, 20 nt, synthetic construct
  source 1..20: mol_type = other RNA
tgtccccactgggtttgcca

SEQ ID NO: 11150 - RNA, 20 nt, synthetic construct
  source 1..20: mol_type = other RNA
tgtcttcatcagctaccgcc

SEQ ID NO: 11151 - RNA, 20 nt, synthetic construct
  source 1..20: mol_type = other RNA
ttcatcagctaccgccggaa

SEQ ID NO: 11152 - RNA, 20 nt, synthetic construct
  source 1..20: mol_type = other RNA
ttcccagctggccaggtgag

SEQ ID NO: 11153 - RNA, 20 nt, synthetic construct
  source 1..20: mol_type = other RNA
ttccggcggtagctgatgaa

SEQ ID NO: 11154 - RNA, 20 nt, synthetic construct
  source 1..20: mol_type = other RNA
ttgccaccagtacagggcag

SEQ ID NO: 11155 - RNA, 20 nt, synthetic construct
  source 1..20: mol_type = other RNA
tttgccaccagtacagggca

SEQ ID NO: 11156 - RNA, 21 nt, synthetic construct
  source 1..21: mol_type = other RNA
aaacccagtggggacactcca

SEQ ID NO: 11157 - RNA, 21 nt, synthetic construct
  source 1..21: mol_type = other RNA
aaatgctacactccccgctgc

SEQ ID NO: 11158 - RNA, 21 nt, synthetic construct
  source 1..21: mol_type = other RNA
aacctgagttccggcggtagg

SEQ ID NO: 11159 - RNA, 21 nt, synthetic construct
  source 1..21: mol_type = other RNA
aacctgagttccggcggtagc

SEQ ID NO: 11160 - RNA, 21 nt, synthetic construct
  source 1..21: mol_type = other RNA
aactcaggttcccagctggcc

SEQ ID NO: 11161 - RNA, 21 nt, synthetic construct
  source 1..21: mol_type = other RNA
aagacatctggagtgtcccca

SEQ ID NO: 11162 - RNA, 21 nt, synthetic construct
  source 1..21: mol_type = other RNA
aatgctacactccccgctgcc

SEQ ID NO: 11163 - RNA, 21 nt, synthetic construct
  source 1..21: mol_type = other RNA
acactccagatgtcttcatca

SEQ ID NO: 11164 - RNA, 21 nt, synthetic construct
  source 1..21: mol_type = other RNA
acactccccgctgccctgtac

SEQ ID NO: 11165 - RNA, 21 nt, synthetic construct
  source 1..21: mol_type = other RNA
acatctggagtgtccccactg

SEQ ID NO: 11166 - RNA, 21 nt, synthetic construct
  source 1..21: mol_type = other RNA
accagtacagggcagcgggga

SEQ ID NO: 11167 - RNA, 21 nt, synthetic construct
  source 1..21: mol_type = other RNA
acccagtggggacactccaga

SEQ ID NO: 11168 - RNA, 21 nt, synthetic construct
  source 1..21: mol_type = other RNA
accgccggaactcaggttccc

SEQ ID NO: 11169 - RNA, 21 nt, synthetic construct
  source 1..21: mol_type = other RNA
acctgagttccggcggtagct

SEQ ID NO: 11170 - RNA, 21 nt, synthetic construct
  source 1..21: mol_type = other RNA
acctggccagctgggaacctg

SEQ ID NO: 11171 - RNA, 21 nt, synthetic construct
  source 1..21: mol_type = other RNA
actcaggttcccagctggcca

SEQ ID NO: 11172 - RNA, 21 nt, synthetic construct
  source 1..21: mol_type = other RNA
actccagatgtcttcatcagc

SEQ ID NO: 11173 - RNA, 21 nt, synthetic construct
  source 1..21: mol_type = other RNA
actccccgctgccctgtactg

SEQ ID NO: 11174 - RNA, 21 nt, synthetic construct
  source 1..21: mol_type = other RNA
actgggtttgccaccagtaca

SEQ ID NO: 11175 - RNA, 21 nt, synthetic construct
  source 1..21: mol_type = other RNA
actggtggcaaacccagtggg

SEQ ID NO: 11176 - RNA, 21 nt, synthetic construct
  source 1..21: mol_type = other RNA
agacatctggagtgtccccac

SEQ ID NO: 11177 - RNA, 21 nt, synthetic construct
  source 1..21: mol_type = other RNA
agatgtcttcatcagctaccg

SEQ ID NO: 11178 - RNA, 21 nt, synthetic construct
  source 1..21: mol_type = other RNA
agctaccgccggaactcaggt

SEQ ID NO: 11179 - RNA, 21 nt, synthetic construct
  source 1..21: mol_type = other RNA
agctgatgaagacatctggag

SEQ ID NO: 11180 - RNA, 21 nt, synthetic construct
  source 1..21: mol_type = other RNA
agctggccaggtgaggagggg

SEQ ID NO: 11181 - RNA, 21 nt, synthetic construct
  source 1..21: mol_type = other RNA
agctgggaacctgagttccgg

SEQ ID NO: 11182 - RNA, 21 nt, synthetic construct
  source 1..21: mol_type = other RNA
aggtgaggaggggcgggcggg

SEQ ID NO: 11183 - RNA, 21 nt, synthetic construct
  source 1..21: mol_type = other RNA
aggttcccagctggccaggtg

SEQ ID NO: 11184 - RNA, 21 nt, synthetic construct
  source 1..21: mol_type = other RNA
agtacagggcagcggggagtg

SEQ ID NO: 11185 - RNA, 21 nt, synthetic construct
  source 1..21: mol_type = other RNA
agtggggacactccagatgtc

SEQ ID NO: 11186 - RNA, 21 nt, synthetic construct
  source 1..21: mol_type = other RNA
agtgtccccactgggtttgcc

SEQ ID NO: 11187 - RNA, 21 nt, synthetic construct
  source 1..21: mol_type = other RNA
agttccggcggtagctgatga

SEQ ID NO: 11188 - RNA, 21 nt, synthetic construct
  source 1..21: mol_type = other RNA
atcagctaccgccggaactca

SEQ ID NO: 11189 - RNA, 21 nt, synthetic construct
  source 1..21: mol_type = other RNA
atctggagtgtccccactggg

SEQ ID NO: 11190 - RNA, 21 nt, synthetic construct
  source 1..21: mol_type = other RNA
atgaagacatctggagtgtcc

SEQ ID NO: 11191 - RNA, 21 nt, synthetic construct
  source 1..21: mol_type = other RNA
atgctacactccccgctgccc

SEQ ID NO: 11192 - RNA, 21 nt, synthetic construct
  source 1..21: mol_type = other RNA
atgtcttcatcagctaccgcc

SEQ ID NO: 11193 - RNA, 21 nt, synthetic construct
  source 1..21: mol_type = other RNA
caaacccagtggggacactcc

SEQ ID NO: 11194 - RNA, 21 nt, synthetic construct
  source 1..21: mol_type = other RNA
caccagtacagggcagcgggg

SEQ ID NO: 11195 - RNA, 21 nt, synthetic construct
  source 1..21: mol_type = other RNA
cacctggccagctgggaacct

SEQ ID NO: 11196 - RNA, 21 nt, synthetic construct
  source 1..21: mol_type = other RNA
cactccagatgtcttcatcag

SEQ ID NO: 11197 - RNA, 21 nt, synthetic construct
  source 1..21: mol_type = other RNA
cactccccgctgccctgtact

SEQ ID NO: 11198 - RNA, 21 nt, synthetic construct
  source 1..21: mol_type = other RNA
cactgggtttgccaccagtac

SEQ ID NO: 11199 - RNA, 21 nt, synthetic construct
  source 1..21: mol_type = other RNA
cagatgtcttcatcagctacc

SEQ ID NO: 11200 - RNA, 21 nt, synthetic construct
  source 1..21: mol_type = other RNA
cagctaccgccggaactcagg

SEQ ID NO: 11201 - RNA, 21 nt, synthetic construct
  source 1..21: mol_type = other RNA
cagctggccaggtgaggaggg

SEQ ID NO: 11202 - RNA, 21 nt, synthetic construct
  source 1..21: mol_type = other RNA
cagctgggaacctgagttccg

SEQ ID NO: 11203 - RNA, 21 nt, synthetic construct
  source 1..21: mol_type = other RNA
caggtgaggaggggcgggcgg

SEQ ID NO: 11204 - RNA, 21 nt, synthetic construct
  source 1..21: mol_type = other RNA
caggttcccagctggccaggt

SEQ ID NO: 11205 - RNA, 21 nt, synthetic construct
  source 1..21: mol_type = other RNA
cagtacagggcagcggggagt

SEQ ID NO: 11206 - RNA, 21 nt, synthetic construct
  source 1..21: mol_type = other RNA
cagtggggacactccagatgt

SEQ ID NO: 11207 - RNA, 21 nt, synthetic construct
  source 1..21: mol_type = other RNA
catcagctaccgccggaactc

SEQ ID NO: 11208 - RNA, 21 nt, synthetic construct
  source 1..21: mol_type = other RNA
catctggagtgtccccactgg

SEQ ID NO: 11209 - RNA, 21 nt, synthetic construct
  source 1..21: mol_type = other RNA
ccaccagtacagggcagcggg

SEQ ID NO: 11210 - RNA, 21 nt, synthetic construct
  source 1..21: mol_type = other RNA
ccactgggtttgccaccagta

SEQ ID NO: 11211 - RNA, 21 nt, synthetic construct
  source 1..21: mol_type = other RNA
ccagatgtcttcatcagctac

SEQ ID NO: 11212 - RNA, 21 nt, synthetic construct
  source 1..21: mol_type = other RNA
ccagctggccaggtgaggagg

SEQ ID NO: 11213 - RNA, 21 nt, synthetic construct
  source 1..21: mol_type = other RNA
ccagctgggaacctgagttcc

SEQ ID NO: 11214 - RNA, 21 nt, synthetic construct
  source 1..21: mol_type = other RNA
ccaggtgaggaggggcgggcg

SEQ ID NO: 11215 - RNA, 21 nt, synthetic construct
  source 1..21: mol_type = other RNA
ccagtacagggcagcggggag

SEQ ID NO: 11216 - RNA, 21 nt, synthetic construct
  source 1..21: mol_type = other RNA
ccagtggggacactccagatg

SEQ ID NO: 11217 - RNA, 21 nt, synthetic construct
  source 1..21: mol_type = other RNA
cccactgggtttgccaccagt

SEQ ID NO: 11218 - RNA, 21 nt, synthetic construct
  source 1..21: mol_type = other RNA
cccagctggccaggtgaggag

SEQ ID NO: 11219 - RNA, 21 nt, synthetic construct
  source 1..21: mol_type = other RNA
cccagtggggacactccagat

SEQ ID NO: 11220 - RNA, 21 nt, synthetic construct
  source 1..21: mol_type = other RNA
ccccactgggtttgccaccag

SEQ ID NO: 11221 - RNA, 21 nt, synthetic construct
  source 1..21: mol_type = other RNA
ccccgctgccctgtactggtg

SEQ ID NO: 11222 - RNA, 21 nt, synthetic construct
  source 1..21: mol_type = other RNA
cccctcctcacctggccagct

SEQ ID NO: 11223 - RNA, 21 nt, synthetic construct
  source 1..21: mol_type = other RNA
cccgcccctcctcacctggcc

SEQ ID NO: 11224 - RNA, 21 nt, synthetic construct
  source 1..21: mol_type = other RNA
cccgcccgcccctcctcacct

SEQ ID NO: 11225 - RNA, 21 nt, synthetic construct
  source 1..21: mol_type = other RNA
cccgctgccctgtactggtgg

SEQ ID NO: 11226 - RNA, 21 nt, synthetic construct
  source 1..21: mol_type = other RNA
cccgtcgctgcccgcccgccc

SEQ ID NO: 11227 - RNA, 21 nt, synthetic construct
  source 1..21: mol_type = other RNA
ccctcctcacctggccagctg

SEQ ID NO: 11228 - RNA, 21 nt, synthetic construct
  source 1..21: mol_type = other RNA
ccctgtactggtggcaaaccc

SEQ ID NO: 11229 - RNA, 21 nt, synthetic construct
  source 1..21: mol_type = other RNA
ccgcccctcctcacctggcca

SEQ ID NO: 11230 - RNA, 21 nt, synthetic construct
  source 1..21: mol_type = other RNA
ccgcccgcccctcctcacctg

SEQ ID NO: 11231 - RNA, 21 nt, synthetic construct
  source 1..21: mol_type = other RNA
ccgccggaactcaggttccca

SEQ ID NO: 11232 - RNA, 21 nt, synthetic construct
  source 1..21: mol_type = other RNA
ccgctgccctgtactggtggc

SEQ ID NO: 11233 - RNA, 21 nt, synthetic construct
  source 1..21: mol_type = other RNA
ccggaactcaggttcccagct

SEQ ID NO: 11234 - RNA, 21 nt, synthetic construct
  source 1..21: mol_type = other RNA
ccggcggtagctgatgaagac

SEQ ID NO: 11235 - RNA, 21 nt, synthetic construct
  source 1..21: mol_type = other RNA
ccgtcgctgcccgcccgcccc

SEQ ID NO: 11236 - RNA, 21 nt, synthetic construct
  source 1..21: mol_type = other RNA
cctcacctggccagctgggaa

SEQ ID NO: 11237 - RNA, 21 nt, synthetic construct
  source 1..21: mol_type = other RNA
cctcctcacctggccagctgg

SEQ ID NO: 11238 - RNA, 21 nt, synthetic construct
  source 1..21: mol_type = other RNA
cctgagttccggcggtagctg

SEQ ID NO: 11239 - RNA, 21 nt, synthetic construct
  source 1..21: mol_type = other RNA
cctggccagctgggaacctga

SEQ ID NO: 11240 - RNA, 21 nt, synthetic construct
  source 1..21: mol_type = other RNA
cctgtactggtggcaaaccca

SEQ ID NO: 11241 - RNA, 21 nt, synthetic construct
  source 1..21: mol_type = other RNA
cgcccctcctcacctggccag

SEQ ID NO: 11242 - RNA, 21 nt, synthetic construct
  source 1..21: mol_type = other RNA
cgcccgcccctcctcacctgg

SEQ ID NO: 11243 - RNA, 21 nt, synthetic construct
  source 1..21: mol_type = other RNA
cgccggaactcaggttcccag

SEQ ID NO: 11244 - RNA, 21 nt, synthetic construct
  source 1..21: mol_type = other RNA
cgctgcccgcccgcccctcct

SEQ ID NO: 11245 - RNA, 21 nt, synthetic construct
  source 1..21: mol_type = other RNA
cgctgccctgtactggtggca

SEQ ID NO: 11246 - RNA, 21 nt, synthetic construct
  source 1..21: mol_type = other RNA
cggaactcaggttcccagctg

SEQ ID NO: 11247 - RNA, 21 nt, synthetic construct
  source 1..21: mol_type = other RNA
cggcggtagctgatgaagaca

SEQ ID NO: 11248 - RNA, 21 nt, synthetic construct
  source 1..21: mol_type = other RNA
cggtagctgatgaagacatct

SEQ ID NO: 11249 - RNA, 21 nt, synthetic construct
  source 1..21: mol_type = other RNA
cgtcgctgcccgcccgcccct

SEQ ID NO: 11250 - RNA, 21 nt, synthetic construct
  source 1..21: mol_type = other RNA
ctacactccccgctgccctgt

SEQ ID NO: 11251 - RNA, 21 nt, synthetic construct
  source 1..21: mol_type = other RNA
ctaccgccggaactcaggttc

SEQ ID NO: 11252 - RNA, 21 nt, synthetic construct
  source 1..21: mol_type = other RNA
ctcacctggccagctgggaac

SEQ ID NO: 11253 - RNA, 21 nt, synthetic construct
  source 1..21: mol_type = other RNA
ctcaggttcccagctggccag

SEQ ID NO: 11254 - RNA, 21 nt, synthetic construct
  source 1..21: mol_type = other RNA
ctccagatgtcttcatcagct

SEQ ID NO: 11255 - RNA, 21 nt, synthetic construct
  source 1..21: mol_type = other RNA
ctccccgctgccctgtactgg

SEQ ID NO: 11256 - RNA, 21 nt, synthetic construct
  source 1..21: mol_type = other RNA
ctcctcacctggccagctggg

SEQ ID NO: 11257 - RNA, 21 nt, synthetic construct
  source 1..21: mol_type = other RNA
ctgagttccggcggtagctga

SEQ ID NO: 11258 - RNA, 21 nt, synthetic construct
  source 1..21: mol_type = other RNA
ctgatgaagacatctggagtg

SEQ ID NO: 11259 - RNA, 21 nt, synthetic construct
  source 1..21: mol_type = other RNA
ctgcccgcccgcccctcctca

SEQ ID NO: 11260 - RNA, 21 nt, synthetic construct
  source 1..21: mol_type = other RNA
ctgccctgtactggtggcaaa

SEQ ID NO: 11261 - RNA, 21 nt, synthetic construct
  source 1..21: mol_type = other RNA
ctggagtgtccccactgggtt

SEQ ID NO: 11262 - RNA, 21 nt, synthetic construct
  source 1..21: mol_type = other RNA
ctggccagctgggaacctgag

SEQ ID NO: 11263 - RNA, 21 nt, synthetic construct
  source 1..21: mol_type = other RNA
ctggccaggtgaggaggggcg

SEQ ID NO: 11264 - RNA, 21 nt, synthetic construct
  source 1..21: mol_type = other RNA
ctgggaacctgagttccggcg

SEQ ID NO: 11265 - RNA, 21 nt, synthetic construct
  source 1..21: mol_type = other RNA
ctgggtttgccaccagtacag

SEQ ID NO: 11266 - RNA, 21 nt, synthetic construct
  source 1..21: mol_type = other RNA
ctggtggcaaacccagtgggg

SEQ ID NO: 11267 - RNA, 21 nt, synthetic construct
  source 1..21: mol_type = other RNA
ctgtactggtggcaaacccag

SEQ ID NO: 11268 - RNA, 21 nt, synthetic construct
  source 1..21: mol_type = other RNA
cttcatcagctaccgccggaa

SEQ ID NO: 11269 - RNA, 21 nt, synthetic construct
  source 1..21: mol_type = other RNA
gaacctgagttccggcggtag

SEQ ID NO: 11270 - RNA, 21 nt, synthetic construct
  source 1..21: mol_type = other RNA
gaactcaggttcccagctggc

SEQ ID NO: 11271 - RNA, 21 nt, synthetic construct
  source 1..21: mol_type = other RNA
gaagacatctggagtgtcccc

SEQ ID NO: 11272 - RNA, 21 nt, synthetic construct
  source 1..21: mol_type = other RNA
gacactccagatgtcttcatc

SEQ ID NO: 11273 - RNA, 21 nt, synthetic construct
  source 1..21: mol_type = other RNA
gacatctggagtgtccccact

SEQ ID NO: 11274 - RNA, 21 nt, synthetic construct
  source 1..21: mol_type = other RNA
gagtgtccccactgggtttgc

SEQ ID NO: 11275 - RNA, 21 nt, synthetic construct
  source 1..21: mol_type = other RNA
gagttccggcggtagctgatg

SEQ ID NO: 11276 - RNA, 21 nt, synthetic construct
  source 1..21: mol_type = other RNA
gatgaagacatctggagtgtc

SEQ ID NO: 11277 - RNA, 21 nt, synthetic construct
  source 1..21: mol_type = other RNA
gatgtcttcatcagctaccgc

SEQ ID NO: 11278 - RNA, 21 nt, synthetic construct
  source 1..21: mol_type = other RNA
gcaaacccagtggggacactc

SEQ ID NO: 11279 - RNA, 21 nt, synthetic construct
  source 1..21: mol_type = other RNA
gccaccagtacagggcagcgg

SEQ ID NO: 11280 - RNA, 21 nt, synthetic construct
  source 1..21: mol_type = other RNA
gccagctgggaacctgagttc

SEQ ID NO: 11281 - RNA, 21 nt, synthetic construct
  source 1..21: mol_type = other RNA
gccaggtgaggaggggcgggc

SEQ ID NO: 11282 - RNA, 21 nt, synthetic construct
  source 1..21: mol_type = other RNA
gcccctcctcacctggccagc

SEQ ID NO: 11283 - RNA, 21 nt, synthetic construct
  source 1..21: mol_type = other RNA
gcccgcccctcctcacctggc

SEQ ID NO: 11284 - RNA, 21 nt, synthetic construct
  source 1..21: mol_type = other RNA
gcccgcccgcccctcctcacc

SEQ ID NO: 11285 - RNA, 21 nt, synthetic construct
  source 1..21: mol_type = other RNA
gccctgtactggtggcaaacc

SEQ ID NO: 11286 - RNA, 21 nt, synthetic construct
  source 1..21: mol_type = other RNA
gccggaactcaggttcccagc

SEQ ID NO: 11287 - RNA, 21 nt, synthetic construct
  source 1..21: mol_type = other RNA
gcggtagctgatgaagacatc

SEQ ID NO: 11288 - RNA, 21 nt, synthetic construct
  source 1..21: mol_type = other RNA
gctacactccccgctgccctg

SEQ ID NO: 11289 - RNA, 21 nt, synthetic construct
  source 1..21: mol_type = other RNA
gctaccgccggaactcaggtt

SEQ ID NO: 11290 - RNA, 21 nt, synthetic construct
  source 1..21: mol_type = other RNA
gctgatgaagacatctggagt

SEQ ID NO: 11291 - RNA, 21 nt, synthetic construct
  source 1..21: mol_type = other RNA
gctgcccgcccgcccctcctc

SEQ ID NO: 11292 - RNA, 21 nt, synthetic construct
  source 1..21: mol_type = other RNA
gctgccctgtactggtggcaa

SEQ ID NO: 11293 - RNA, 21 nt, synthetic construct
  source 1..21: mol_type = other RNA
gctggccaggtgaggaggggc

SEQ ID NO: 11294 - RNA, 21 nt, synthetic construct
  source 1..21: mol_type = other RNA
gctgggaacctgagttccggc

SEQ ID NO: 11295 - RNA, 21 nt, synthetic construct
  source 1..21: mol_type = other RNA
ggaacctgagttccggcggta

SEQ ID NO: 11296 - RNA, 21 nt, synthetic construct
  source 1..21: mol_type = other RNA
ggaactcaggttcccagctgg

SEQ ID NO: 11297 - RNA, 21 nt, synthetic construct
  source 1..21: mol_type = other RNA
ggacactccagatgtcttcat

SEQ ID NO: 11298 - RNA, 21 nt, synthetic construct
  source 1..21: mol_type = other RNA
ggagtgtccccactgggtttg

SEQ ID NO: 11299 - RNA, 21 nt, synthetic construct
  source 1..21: mol_type = other RNA
ggcaaacccagtggggacact

SEQ ID NO: 11300 - RNA, 21 nt, synthetic construct
  source 1..21: mol_type = other RNA
ggccagctgggaacctgagtt

SEQ ID NO: 11301 - RNA, 21 nt, synthetic construct
  source 1..21: mol_type = other RNA
ggccaggtgaggaggggcggg

SEQ ID NO: 11302 - RNA, 21 nt, synthetic construct
  source 1..21: mol_type = other RNA
ggcggtagctgatgaagacat

SEQ ID NO: 11303 - RNA, 21 nt, synthetic construct
  source 1..21: mol_type = other RNA
gggaacctgagttccggcggt

SEQ ID NO: 11304 - RNA, 21 nt, synthetic construct
  source 1..21: mol_type = other RNA
gggacactccagatgtcttca

SEQ ID NO: 11305 - RNA, 21 nt, synthetic construct
  source 1..21: mol_type = other RNA
ggggacactccagatgtcttc

SEQ ID NO: 11306 - RNA, 21 nt, synthetic construct
  source 1..21: mol_type = other RNA
gggtttgccaccagtacaggg

SEQ ID NO: 11307 - RNA, 21 nt, synthetic construct
  source 1..21: mol_type = other RNA
ggtagctgatgaagacatctg

SEQ ID NO: 11308 - RNA, 21 nt, synthetic construct
  source 1..21: mol_type = other RNA
ggtgaggaggggcgggcgggc

SEQ ID NO: 11309 - RNA, 21 nt, synthetic construct
  source 1..21: mol_type = other RNA
ggtggcaaacccagtggggac

SEQ ID NO: 11310 - RNA, 21 nt, synthetic construct
  source 1..21: mol_type = other RNA
ggttcccagctggccaggtga

SEQ ID NO: 11311 - RNA, 21 nt, synthetic construct
  source 1..21: mol_type = other RNA
ggtttgccaccagtacagggc

SEQ ID NO: 11312 - RNA, 21 nt, synthetic construct
  source 1..21: mol_type = other RNA
gtactggtggcaaacccagtg

SEQ ID NO: 11313 - RNA, 21 nt, synthetic construct
  source 1..21: mol_type = other RNA
gtagctgatgaagacatctgg

SEQ ID NO: 11314 - RNA, 21 nt, synthetic construct
  source 1..21: mol_type = other RNA
gtccccactgggtttgccacc

SEQ ID NO: 11315 - RNA, 21 nt, synthetic construct
  source 1..21: mol_type = other RNA
gtcgctgcccgcccgcccctc

SEQ ID NO: 11316 - RNA, 21 nt, synthetic construct
  source 1..21: mol_type = other RNA
gtcttcatcagctaccgccgg

SEQ ID NO: 11317 - RNA, 21 nt, synthetic construct
  source 1..21: mol_type = other RNA
gtgaggaggggcgggcgggca

SEQ ID NO: 11318 - RNA, 21 nt, synthetic construct
  source 1..21: mol_type = other RNA
gtggcaaacccagtggggaca

SEQ ID NO: 11319 - RNA, 21 nt, synthetic construct
  source 1..21: mol_type = other RNA
gtggggacactccagatgtct

SEQ ID NO: 11320 - RNA, 21 nt, synthetic construct
  source 1..21: mol_type = other RNA
gtgtccccactgggtttgcca

SEQ ID NO: 11321 - RNA, 21 nt, synthetic construct
  source 1..21: mol_type = other RNA
gttcccagctggccaggtgag

SEQ ID NO: 11322 - RNA, 21 nt, synthetic construct
  source 1..21: mol_type = other RNA
gttccggcggtagctgatgaa

SEQ ID NO: 11323 - RNA, 21 nt, synthetic construct
  source 1..21: mol_type = other RNA
gtttgccaccagtacagggca

SEQ ID NO: 11324 - RNA, 21 nt, synthetic construct
  source 1..21: mol_type = other RNA
tacactccccgctgccctgta

SEQ ID NO: 11325 - RNA, 21 nt, synthetic construct
  source 1..21: mol_type = other RNA
taccgccggaactcaggttcc

SEQ ID NO: 11326 - RNA, 21 nt, synthetic construct
  source 1..21: mol_type = other RNA
tactggtggcaaacccagtgg

SEQ ID NO: 11327 - RNA, 21 nt, synthetic construct
  source 1..21: mol_type = other RNA
tagctgatgaagacatctgga

SEQ ID NO: 11328 - RNA, 21 nt, synthetic construct
  source 1..21: mol_type = other RNA
tcacctggccagctgggaacc

SEQ ID NO: 11329 - RNA, 21 nt, synthetic construct
  source 1..21: mol_type = other RNA
tcagctaccgccggaactcag

SEQ ID NO: 11330 - RNA, 21 nt, synthetic construct
  source 1..21: mol_type = other RNA
tcaggttcccagctggccagg

SEQ ID NO: 11331 - RNA, 21 nt, synthetic construct
  source 1..21: mol_type = other RNA
tcatcagctaccgccggaact

SEQ ID NO: 11332 - RNA, 21 nt, synthetic construct
  source 1..21: mol_type = other RNA
tccagatgtcttcatcagcta

SEQ ID NO: 11333 - RNA, 21 nt, synthetic construct
  source 1..21: mol_type = other RNA
tcccagctggccaggtgagga

SEQ ID NO: 11334 - RNA, 21 nt, synthetic construct
  source 1..21: mol_type = other RNA
tccccactgggtttgccacca

SEQ ID NO: 11335 - RNA, 21 nt, synthetic construct
  source 1..21: mol_type = other RNA
tccccgctgccctgtactggt

SEQ ID NO: 11336 - RNA, 21 nt, synthetic construct
  source 1..21: mol_type = other RNA
tccggcggtagctgatgaaga

SEQ ID NO: 11337 - RNA, 21 nt, synthetic construct
  source 1..21: mol_type = other RNA
tcctcacctggccagctggga

SEQ ID NO: 11338 - RNA, 21 nt, synthetic construct
  source 1..21: mol_type = other RNA
tcgctgcccgcccgcccctcc

SEQ ID NO: 11339 - RNA, 21 nt, synthetic construct
  source 1..21: mol_type = other RNA
tctggagtgtccccactgggt

SEQ ID NO: 11340 - RNA, 21 nt, synthetic construct
  source 1..21: mol_type = other RNA
tcttcatcagctaccgccgga

SEQ ID NO: 11341 - RNA, 21 nt, synthetic construct
  source 1..21: mol_type = other RNA
tgaagacatctggagtgtccc

SEQ ID NO: 11342 - RNA, 21 nt, synthetic construct
  source 1..21: mol_type = other RNA
tgagttccggcggtagctgat

SEQ ID NO: 11343 - RNA, 21 nt, synthetic construct
  source 1..21: mol_type = other RNA
tgatgaagacatctggagtgt

SEQ ID NO: 11344 - RNA, 21 nt, synthetic construct
  source 1..21: mol_type = other RNA
tgccaccagtacagggcagcg

SEQ ID NO: 11345 - RNA, 21 nt, synthetic construct
  source 1..21: mol_type = other RNA
tgcccgcccgcccctcctcac

SEQ ID NO: 11346 - RNA, 21 nt, synthetic construct
  source 1..21: mol_type = other RNA
tgccctgtactggtggcaaac

SEQ ID NO: 11347 - RNA, 21 nt, synthetic construct
  source 1..21: mol_type = other RNA
tgctacactccccgctgccct

SEQ ID NO: 11348 - RNA, 21 nt, synthetic construct
  source 1..21: mol_type = other RNA
tggagtgtccccactgggttt

SEQ ID NO: 11349 - RNA, 21 nt, synthetic construct
  source 1..21: mol_type = other RNA
tggcaaacccagtggggacac

SEQ ID NO: 11350 - RNA, 21 nt, synthetic construct
  source 1..21: mol_type = other RNA
tggccagctgggaacctgagt

SEQ ID NO: 11351 - RNA, 21 nt, synthetic construct
  source 1..21: mol_type = other RNA
tggccaggtgaggaggggcgg

SEQ ID NO: 11352 - RNA, 21 nt, synthetic construct
  source 1..21: mol_type = other RNA
tgggaacctgagttccggcgg

SEQ ID NO: 11353 - RNA, 21 nt, synthetic construct
  source 1..21: mol_type = other RNA
tggggacactccagatgtctt

SEQ ID NO: 11354 - RNA, 21 nt, synthetic construct
  source 1..21: mol_type = other RNA
tgggtttgccaccagtacagg

SEQ ID NO: 11355 - RNA, 21 nt, synthetic construct
  source 1..21: mol_type = other RNA
tggtggcaaacccagtgggga

SEQ ID NO: 11356 - RNA, 21 nt, synthetic construct
  source 1..21: mol_type = other RNA
tgtactggtggcaaacccagt

SEQ ID NO: 11357 - RNA, 21 nt, synthetic construct
  source 1..21: mol_type = other RNA
tgtccccactgggtttgccac

SEQ ID NO: 11358 - RNA, 21 nt, synthetic construct
  source 1..21: mol_type = other RNA
tgtcttcatcagctaccgccg

SEQ ID NO: 11359 - RNA, 21 nt, synthetic construct
  source 1..21: mol_type = other RNA
ttcatcagctaccgccggaac

SEQ ID NO: 11360 - RNA, 21 nt, synthetic construct
  source 1..21: mol_type = other RNA
ttcccagctggccaggtgagg

SEQ ID NO: 11361 - RNA, 21 nt, synthetic construct
  source 1..21: mol_type = other RNA
ttccggcggtagctgatgaag

SEQ ID NO: 11362 - RNA, 21 nt, synthetic construct
  source 1..21: mol_type = other RNA
ttgccaccagtacagggcagc

SEQ ID NO: 11363 - RNA, 21 nt, synthetic construct
  source 1..21: mol_type = other RNA
tttgccaccagtacagggcag

SEQ ID NO: 11364 - RNA, 22 nt, synthetic construct
  source 1..22: mol_type = other RNA
aaacccagtggggacactccag

SEQ ID NO: 11365 - RNA, 22 nt, synthetic construct
  source 1..22: mol_type = other RNA
aaatgctacactccccgctgcc

SEQ ID NO: 11366 - RNA, 22 nt, synthetic construct
  source 1..22: mol_type = other RNA
aacccagtggggacactccaga

SEQ ID NO: 11367 - RNA, 22 nt, synthetic construct
  source 1..22: mol_type = other RNA
aacctgagttccggcggtagct

SEQ ID NO: 11368 - RNA, 22 nt, synthetic construct
  source 1..22: mol_type = other RNA
aactcaggttcccagctggcca

SEQ ID NO: 11369 - RNA, 22 nt, synthetic construct
  source 1..22: mol_type = other RNA
aagacatctggagtgtccccac

SEQ ID NO: 11370 - RNA, 22 nt, synthetic construct
  source 1..22: mol_type = other RNA
aatgctacactccccgctgccc

SEQ ID NO: 11371 - RNA, 22 nt, synthetic construct
  source 1..22: mol_type = other RNA
acactccagatgtcttcatcag

SEQ ID NO: 11372 - RNA, 22 nt, synthetic construct
  source 1..22: mol_type = other RNA
acactccccgctgccctgtact

SEQ ID NO: 11373 - RNA, 22 nt, synthetic construct
  source 1..22: mol_type = other RNA
acatctggagtgtccccactgg

SEQ ID NO: 11374 - RNA, 22 nt, synthetic construct
  source 1..22: mol_type = other RNA
accagtacagggcagcggggag

SEQ ID NO: 11375 - RNA, 22 nt, synthetic construct
  source 1..22: mol_type = other RNA
acccagtggggacactccagat

SEQ ID NO: 11376 - RNA, 22 nt, synthetic construct
  source 1..22: mol_type = other RNA
accgccggaactcaggttccca

SEQ ID NO: 11377 - RNA, 22 nt, synthetic construct
  source 1..22: mol_type = other RNA
acctgagttccggcggtagctg

SEQ ID NO: 11378 - RNA, 22 nt, synthetic construct
  source 1..22: mol_type = other RNA
acctggccagctgggaacctga

SEQ ID NO: 11379 - RNA, 22 nt, synthetic construct
  source 1..22: mol_type = other RNA
actcaggttcccagctggccag

SEQ ID NO: 11380 - RNA, 22 nt, synthetic construct
  source 1..22: mol_type = other RNA
actccagatgtcttcatcagct

SEQ ID NO: 11381 - RNA, 22 nt, synthetic construct
  source 1..22: mol_type = other RNA
actccccgctgccctgtactgg

SEQ ID NO: 11382 - RNA, 22 nt, synthetic construct
  source 1..22: mol_type = other RNA
actgggtttgccaccagtacag

SEQ ID NO: 11383 - RNA, 22 nt, synthetic construct
  source 1..22: mol_type = other RNA
actggtggcaaacccagtgggg

SEQ ID NO: 11384 - RNA, 22 nt, synthetic construct
  source 1..22: mol_type = other RNA
agacatctggagtgtccccact

SEQ ID NO: 11385 - RNA, 22 nt, synthetic construct
  source 1..22: mol_type = other RNA
agatgtcttcatcagctaccgc

SEQ ID NO: 11386 - RNA, 22 nt, synthetic construct
  source 1..22: mol_type = other RNA
agctaccgccggaactcaggtt

SEQ ID NO: 11387 - RNA, 22 nt, synthetic construct
  source 1..22: mol_type = other RNA
agctgatgaagacatctggagt

SEQ ID NO: 11388 - RNA, 22 nt, synthetic construct
  source 1..22: mol_type = other RNA
agctggccaggtgaggaggggc

SEQ ID NO: 11389 - RNA, 22 nt, synthetic construct
  source 1..22: mol_type = other RNA
agctgggaacctgagttccggc

SEQ ID NO: 11390 - RNA, 22 nt, synthetic construct
  source 1..22: mol_type = other RNA
aggtgaggaggggcgggcgggc

SEQ ID NO: 11391 - RNA, 22 nt, synthetic construct
  source 1..22: mol_type = other RNA
aggttcccagctggccaggtga

SEQ ID NO: 11392 - RNA, 22 nt, synthetic construct
  source 1..22: mol_type = other RNA
agtggggacactccagatgtct

SEQ ID NO: 11393 - RNA, 22 nt, synthetic construct
  source 1..22: mol_type = other RNA
agtgtccccactgggtttgcca

SEQ ID NO: 11394 - RNA, 22 nt, synthetic construct
  source 1..22: mol_type = other RNA
agttccggcggtagctgatgaa

SEQ ID NO: 11395 - RNA, 22 nt, synthetic construct
  source 1..22: mol_type = other RNA
atcagctaccgccggaactcag

SEQ ID NO: 11396 - RNA, 22 nt, synthetic construct
  source 1..22: mol_type = other RNA
atctggagtgtccccactgggt

SEQ ID NO: 11397 - RNA, 22 nt, synthetic construct
  source 1..22: mol_type = other RNA
atgaagacatctggagtgtccc

SEQ ID NO: 11398 - RNA, 22 nt, synthetic construct
  source 1..22: mol_type = other RNA
atgctacactccccgctgccct

SEQ ID NO: 11399 - RNA, 22 nt, synthetic construct
  source 1..22: mol_type = other RNA
atgtcttcatcagctaccgccg

SEQ ID NO: 11400 - RNA, 22 nt, synthetic construct
  source 1..22: mol_type = other RNA
caaacccagtggggacactcca

SEQ ID NO: 11401 - RNA, 22 nt, synthetic construct
  source 1..22: mol_type = other RNA
caccagtacagggcagcgggga

SEQ ID NO: 11402 - RNA, 22 nt, synthetic construct
  source 1..22: mol_type = other RNA
cacctggccagctgggaacctg

SEQ ID NO: 11403 - RNA, 22 nt, synthetic construct
  source 1..22: mol_type = other RNA
cactccagatgtcttcatcagc

SEQ ID NO: 11404 - RNA, 22 nt, synthetic construct
  source 1..22: mol_type = other RNA
cactccccgctgccctgtactg

SEQ ID NO: 11405 - RNA, 22 nt, synthetic construct
  source 1..22: mol_type = other RNA
cactgggtttgccaccagtaca

SEQ ID NO: 11406 - RNA, 22 nt, synthetic construct
  source 1..22: mol_type = other RNA
cagatgtcttcatcagctaccg

SEQ ID NO: 11407 - RNA, 22 nt, synthetic construct
  source 1..22: mol_type = other RNA
cagctaccgccggaactcaggt

SEQ ID NO: 11408 - RNA, 22 nt, synthetic construct
  source 1..22: mol_type = other RNA
cagctggccaggtgaggagggg

SEQ ID NO: 11409 - RNA, 22 nt, synthetic construct
  source 1..22: mol_type = other RNA
cagctgggaacctgagttccgg

SEQ ID NO: 11410 - RNA, 22 nt, synthetic construct
  source 1..22: mol_type = other RNA
caggtgaggaggggcgggcggg

SEQ ID NO: 11411 - RNA, 22 nt, synthetic construct
  source 1..22: mol_type = other RNA
caggttcccagctggccaggtg

SEQ ID NO: 11412 - RNA, 22 nt, synthetic construct
  source 1..22: mol_type = other RNA
cagtacagggcagcggggagtg

SEQ ID NO: 11413 - RNA, 22 nt, synthetic construct
  source 1..22: mol_type = other RNA
cagtggggacactccagatgtc

SEQ ID NO: 11414 - RNA, 22 nt, synthetic construct
  source 1..22: mol_type = other RNA
catcagctaccgccggaactca

SEQ ID NO: 11415 - RNA, 22 nt, synthetic construct
  source 1..22: mol_type = other RNA
catctggagtgtccccactggg

SEQ ID NO: 11416 - RNA, 22 nt, synthetic construct
  source 1..22: mol_type = other RNA
ccaccagtacagggcagcgggg

SEQ ID NO: 11417 - RNA, 22 nt, synthetic construct
  source 1..22: mol_type = other RNA
ccactgggtttgccaccagtac

SEQ ID NO: 11418 - RNA, 22 nt, synthetic construct
  source 1..22: mol_type = other RNA
ccagatgtcttcatcagctacc

SEQ ID NO: 11419 - RNA, 22 nt, synthetic construct
  source 1..22: mol_type = other RNA
ccagctggccaggtgaggaggg

SEQ ID NO: 11420 - RNA, 22 nt, synthetic construct
  source 1..22: mol_type = other RNA
ccagctgggaacctgagttccg

SEQ ID NO: 11421 - RNA, 22 nt, synthetic construct
  source 1..22: mol_type = other RNA
ccaggtgaggaggggcgggcgg

SEQ ID NO: 11422 - RNA, 22 nt, synthetic construct
  source 1..22: mol_type = other RNA
ccagtacagggcagcggggagt

SEQ ID NO: 11423 - RNA, 22 nt, synthetic construct
  source 1..22: mol_type = other RNA
ccagtggggacactccagatgt

SEQ ID NO: 11424 - RNA, 22 nt, synthetic construct
  source 1..22: mol_type = other RNA
cccactgggtttgccaccagta

SEQ ID NO: 11425 - RNA, 22 nt, synthetic construct
  source 1..22: mol_type = other RNA
cccagctggccaggtgaggagg

SEQ ID NO: 11426 - RNA, 22 nt, synthetic construct
  source 1..22: mol_type = other RNA
cccagtggggacactccagatg

SEQ ID NO: 11427 - RNA, 22 nt, synthetic construct
  source 1..22: mol_type = other RNA
ccccactgggtttgccaccagt

SEQ ID NO: 11428 - RNA, 22 nt, synthetic construct
  source 1..22: mol_type = other RNA
ccccgctgccctgtactggtgg

SEQ ID NO: 11429 - RNA, 22 nt, synthetic construct
  source 1..22: mol_type = other RNA
ccccgtcgctgcccgcccgccc

SEQ ID NO: 11430 - RNA, 22 nt, synthetic construct
  source 1..22: mol_type = other RNA
cccctcctcacctggccagctg

SEQ ID NO: 11431 - RNA, 22 nt, synthetic construct
  source 1..22: mol_type = other RNA
cccgcccctcctcacctggcca

SEQ ID NO: 11432 - RNA, 22 nt, synthetic construct
  source 1..22: mol_type = other RNA
cccgcccgcccctcctcacctg

SEQ ID NO: 11433 - RNA, 22 nt, synthetic construct
  source 1..22: mol_type = other RNA
cccgctgccctgtactggtggc

SEQ ID NO: 11434 - RNA, 22 nt, synthetic construct
  source 1..22: mol_type = other RNA
cccgtcgctgcccgcccgcccc

SEQ ID NO: 11435 - RNA, 22 nt, synthetic construct
  source 1..22: mol_type = other RNA
ccctcctcacctggccagctgg

SEQ ID NO: 11436 - RNA, 22 nt, synthetic construct
  source 1..22: mol_type = other RNA
ccctgtactggtggcaaaccca

SEQ ID NO: 11437 - RNA, 22 nt, synthetic construct
  source 1..22: mol_type = other RNA
ccgcccctcctcacctggccag

SEQ ID NO: 11438 - RNA, 22 nt, synthetic construct
  source 1..22: mol_type = other RNA
ccgcccgcccctcctcacctgg

SEQ ID NO: 11439 - RNA, 22 nt, synthetic construct
  source 1..22: mol_type = other RNA
ccgccggaactcaggttcccag

SEQ ID NO: 11440 - RNA, 22 nt, synthetic construct
  source 1..22: mol_type = other RNA
ccgctgccctgtactggtggca

SEQ ID NO: 11441 - RNA, 22 nt, synthetic construct
  source 1..22: mol_type = other RNA
ccggaactcaggttcccagctg

SEQ ID NO: 11442 - RNA, 22 nt, synthetic construct
  source 1..22: mol_type = other RNA
ccggcggtagctgatgaagaca

SEQ ID NO: 11443 - RNA, 22 nt, synthetic construct
  source 1..22: mol_type = other RNA
ccgtcgctgcccgcccgcccct

SEQ ID NO: 11444 - RNA, 22 nt, synthetic construct
  source 1..22: mol_type = other RNA
cctcacctggccagctgggaac

SEQ ID NO: 11445 - RNA, 22 nt, synthetic construct
  source 1..22: mol_type = other RNA
cctcctcacctggccagctggg

SEQ ID NO: 11446 - RNA, 22 nt, synthetic construct
  source 1..22: mol_type = other RNA
cctgagttccggcggtagctga

SEQ ID NO: 11447 - RNA, 22 nt, synthetic construct
  source 1..22: mol_type = other RNA
cctggccagctgggaacctgag

SEQ ID NO: 11448 - RNA, 22 nt, synthetic construct
  source 1..22: mol_type = other RNA
cctgtactggtggcaaacccag

SEQ ID NO: 11449 - RNA, 22 nt, synthetic construct
  source 1..22: mol_type = other RNA
cgcccctcctcacctggccagc

SEQ ID NO: 11450 - RNA, 22 nt, synthetic construct
  source 1..22: mol_type = other RNA
cgcccgcccctcctcacctggc

SEQ ID NO: 11451 - RNA, 22 nt, synthetic construct
  source 1..22: mol_type = other RNA
cgccggaactcaggttcccagc

SEQ ID NO: 11452 - RNA, 22 nt, synthetic construct
  source 1..22: mol_type = other RNA
cgctgcccgcccgcccctcctc

SEQ ID NO: 11453 - RNA, 22 nt, synthetic construct
  source 1..22: mol_type = other RNA
cgctgccctgtactggtggcaa

SEQ ID NO: 11454 - RNA, 22 nt, synthetic construct
  source 1..22: mol_type = other RNA
cggaactcaggttcccagctgg

SEQ ID NO: 11455 - RNA, 22 nt, synthetic construct
  source 1..22: mol_type = other RNA
cggcggtagctgatgaagacat

SEQ ID NO: 11456 - RNA, 22 nt, synthetic construct
  source 1..22: mol_type = other RNA
cggtagctgatgaagacatctg

SEQ ID NO: 11457 - RNA, 22 nt, synthetic construct
  source 1..22: mol_type = other RNA
cgtcgctgcccgcccgcccctc

SEQ ID NO: 11458 - RNA, 22 nt, synthetic construct
  source 1..22: mol_type = other RNA
ctacactccccgctgccctgta

SEQ ID NO: 11459 - RNA, 22 nt, synthetic construct
  source 1..22: mol_type = other RNA
ctaccgccggaactcaggttcc

SEQ ID NO: 11460 - RNA, 22 nt, synthetic construct
  source 1..22: mol_type = other RNA
ctcacctggccagctgggaacc

SEQ ID NO: 11461 - RNA, 22 nt, synthetic construct
  source 1..22: mol_type = other RNA
ctcaggttcccagctggccagg

SEQ ID NO: 11462 - RNA, 22 nt, synthetic construct
  source 1..22: mol_type = other RNA
ctccagatgtcttcatcagcta

SEQ ID NO: 11463 - RNA, 22 nt, synthetic construct
  source 1..22: mol_type = other RNA
ctccccgctgccctgtactggt

SEQ ID NO: 11464 - RNA, 22 nt, synthetic construct
  source 1..22: mol_type = other RNA
ctcctcacctggccagctggga

SEQ ID NO: 11465 - RNA, 22 nt, synthetic construct
  source 1..22: mol_type = other RNA
ctgagttccggcggtagctgat

SEQ ID NO: 11466 - RNA, 22 nt, synthetic construct
  source 1..22: mol_type = other RNA
ctgatgaagacatctggagtgt

SEQ ID NO: 11467 - RNA, 22 nt, synthetic construct
  source 1..22: mol_type = other RNA
ctgcccgcccgcccctcctcac

SEQ ID NO: 11468 - RNA, 22 nt, synthetic construct
  source 1..22: mol_type = other RNA
ctgccctgtactggtggcaaac

SEQ ID NO: 11469 - RNA, 22 nt, synthetic construct
  source 1..22: mol_type = other RNA
ctggagtgtccccactgggttt

SEQ ID NO: 11470 - RNA, 22 nt, synthetic construct
  source 1..22: mol_type = other RNA
ctggccagctgggaacctgagt

SEQ ID NO: 11471 - RNA, 22 nt, synthetic construct
  source 1..22: mol_type = other RNA
ctggccaggtgaggaggggcgg

SEQ ID NO: 11472 - RNA, 22 nt, synthetic construct
  source 1..22: mol_type = other RNA
ctgggaacctgagttccggcgg

SEQ ID NO: 11473 - RNA, 22 nt, synthetic construct
  source 1..22: mol_type = other RNA
ctgggtttgccaccagtacagg

SEQ ID NO: 11474 - RNA, 22 nt, synthetic construct
  source 1..22: mol_type = other RNA
ctggtggcaaacccagtgggga

SEQ ID NO: 11475 - RNA, 22 nt, synthetic construct
  source 1..22: mol_type = other RNA
ctgtactggtggcaaacccagt

SEQ ID NO: 11476 - RNA, 22 nt, synthetic construct
  source 1..22: mol_type = other RNA
cttcatcagctaccgccggaac

SEQ ID NO: 11477 - RNA, 22 nt, synthetic construct
  source 1..22: mol_type = other RNA
gaacctgagttccggcggtagc

SEQ ID NO: 11478 - RNA, 22 nt, synthetic construct
  source 1..22: mol_type = other RNA
gaactcaggttcccagctggcc

SEQ ID NO: 11479 - RNA, 22 nt, synthetic construct
  source 1..22: mol_type = other RNA
gaagacatctggagtgtcccca

SEQ ID NO: 11480 - RNA, 22 nt, synthetic construct
  source 1..22: mol_type = other RNA
gacactccagatgtcttcatca

SEQ ID NO: 11481 - RNA, 22 nt, synthetic construct
  source 1..22: mol_type = other RNA
gacatctggagtgtccccactg

SEQ ID NO: 11482 - RNA, 22 nt, synthetic construct
  source 1..22: mol_type = other RNA
gagtgtccccactgggtttgcc

SEQ ID NO: 11483 - RNA, 22 nt, synthetic construct
  source 1..22: mol_type = other RNA
gagttccggcggtagctgatga

SEQ ID NO: 11484 - RNA, 22 nt, synthetic construct
  source 1..22: mol_type = other RNA
gatgaagacatctggagtgtcc

SEQ ID NO: 11485 - RNA, 22 nt, synthetic construct
  source 1..22: mol_type = other RNA
gatgtcttcatcagctaccgcc

SEQ ID NO: 11486 - RNA, 22 nt, synthetic construct
  source 1..22: mol_type = other RNA
gcaaacccagtggggacactcc

SEQ ID NO: 11487 - RNA, 22 nt, synthetic construct
  source 1..22: mol_type = other RNA
gccaccagtacagggcagcggg

SEQ ID NO: 11488 - RNA, 22 nt, synthetic construct
  source 1..22: mol_type = other RNA
gccagctgggaacctgagttcc

SEQ ID NO: 11489 - RNA, 22 nt, synthetic construct
  source 1..22: mol_type = other RNA
gccaggtgaggaggggcgggcg

SEQ ID NO: 11490 - RNA, 22 nt, synthetic construct
  source 1..22: mol_type = other RNA
gcccctcctcacctggccagct

SEQ ID NO: 11491 - RNA, 22 nt, synthetic construct
  source 1..22: mol_type = other RNA
gcccgcccctcctcacctggcc

SEQ ID NO: 11492 - RNA, 22 nt, synthetic construct
  source 1..22: mol_type = other RNA
gcccgcccgcccctcctcacct

SEQ ID NO: 11493 - RNA, 22 nt, synthetic construct
  source 1..22: mol_type = other RNA
gccctgtactggtggcaaaccc

SEQ ID NO: 11494 - RNA, 22 nt, synthetic construct
  source 1..22: mol_type = other RNA
gccggaactcaggttcccagct

SEQ ID NO: 11495 - RNA, 22 nt, synthetic construct
  source 1..22: mol_type = other RNA
gcggtagctgatgaagacatct

SEQ ID NO: 11496 - RNA, 22 nt, synthetic construct
  source 1..22: mol_type = other RNA
gctacactccccgctgccctgt

SEQ ID NO: 11497 - RNA, 22 nt, synthetic construct
  source 1..22: mol_type = other RNA
gctaccgccggaactcaggttc

SEQ ID NO: 11498 - RNA, 22 nt, synthetic construct
  source 1..22: mol_type = other RNA
gctgatgaagacatctggagtg

SEQ ID NO: 11499 - RNA, 22 nt, synthetic construct
  source 1..22: mol_type = other RNA
gctgcccgcccgcccctcctca

SEQ ID NO: 11500 - RNA, 22 nt, synthetic construct
  source 1..22: mol_type = other RNA
gctgccctgtactggtggcaaa

SEQ ID NO: 11501 - RNA, 22 nt, synthetic construct
  source 1..22: mol_type = other RNA
gctggccaggtgaggaggggcg

SEQ ID NO: 11502 - RNA, 22 nt, synthetic construct
  source 1..22: mol_type = other RNA
gctgggaacctgagttccggcg

SEQ ID NO: 11503 - RNA, 22 nt, synthetic construct
  source 1..22: mol_type = other RNA
ggaacctgagttccggcggtag

SEQ ID NO: 11504 - RNA, 22 nt, synthetic construct
  source 1..22: mol_type = other RNA
ggaactcaggttcccagctggc

SEQ ID NO: 11505 - RNA, 22 nt, synthetic construct
  source 1..22: mol_type = other RNA
ggacactccagatgtcttcatc

SEQ ID NO: 11506 - RNA, 22 nt, synthetic construct
  source 1..22: mol_type = other RNA
ggagtgtccccactgggtttgc

SEQ ID NO: 11507 - RNA, 22 nt, synthetic construct
  source 1..22: mol_type = other RNA
ggcaaacccagtggggacactc

SEQ ID NO: 11508 - RNA, 22 nt, synthetic construct
  source 1..22: mol_type = other RNA
ggccagctgggaacctgagttc

SEQ ID NO: 11509 - RNA, 22 nt, synthetic construct
  source 1..22: mol_type = other RNA
ggccaggtgaggaggggcgggc

SEQ ID NO: 11510 - RNA, 22 nt, synthetic construct
  source 1..22: mol_type = other RNA
ggcggtagctgatgaagacatc

SEQ ID NO: 11511 - RNA, 22 nt, synthetic construct
  source 1..22: mol_type = other RNA
gggaacctgagttccggcggta

SEQ ID NO: 11512 - RNA, 22 nt, synthetic construct
  source 1..22: mol_type = other RNA
gggacactccagatgtcttcat

SEQ ID NO: 11513 - RNA, 22 nt, synthetic construct
  source 1..22: mol_type = other RNA
ggggacactccagatgtcttca

SEQ ID NO: 11514 - RNA, 22 nt, synthetic construct
  source 1..22: mol_type = other RNA
gggtttgccaccagtacagggc

SEQ ID NO: 11515 - RNA, 22 nt, synthetic construct
  source 1..22: mol_type = other RNA
ggtagctgatgaagacatctgg

SEQ ID NO: 11516 - RNA, 22 nt, synthetic construct
  source 1..22: mol_type = other RNA
ggtgaggaggggcgggcgggca

SEQ ID NO: 11517 - RNA, 22 nt, synthetic construct
  source 1..22: mol_type = other RNA
ggtggcaaacccagtggggaca

SEQ ID NO: 11518 - RNA, 22 nt, synthetic construct
  source 1..22: mol_type = other RNA
ggttcccagctggccaggtgag

SEQ ID NO: 11519 - RNA, 22 nt, synthetic construct
  source 1..22: mol_type = other RNA
ggtttgccaccagtacagggca

SEQ ID NO: 11520 - RNA, 22 nt, synthetic construct
  source 1..22: mol_type = other RNA
gtactggtggcaaacccagtgg

SEQ ID NO: 11521 - RNA, 22 nt, synthetic construct
  source 1..22: mol_type = other RNA
gtagctgatgaagacatctgga

SEQ ID NO: 11522 - RNA, 22 nt, synthetic construct
  source 1..22: mol_type = other RNA
gtccccactgggtttgccacca

SEQ ID NO: 11523 - RNA, 22 nt, synthetic construct
  source 1..22: mol_type = other RNA
gtcgctgcccgcccgcccctcc

SEQ ID NO: 11524 - RNA, 22 nt, synthetic construct
  source 1..22: mol_type = other RNA
gtcttcatcagctaccgccgga

SEQ ID NO: 11525 - RNA, 22 nt, synthetic construct
  source 1..22: mol_type = other RNA
gtgaggaggggcgggcgggcag

SEQ ID NO: 11526 - RNA, 22 nt, synthetic construct
  source 1..22: mol_type = other RNA
gtggcaaacccagtggggacac

SEQ ID NO: 11527 - RNA, 22 nt, synthetic construct
  source 1..22: mol_type = other RNA
gtggggacactccagatgtctt

SEQ ID NO: 11528 - RNA, 22 nt, synthetic construct
  source 1..22: mol_type = other RNA
gtgtccccactgggtttgccac

SEQ ID NO: 11529 - RNA, 22 nt, synthetic construct
  source 1..22: mol_type = other RNA
gttcccagctggccaggtgagg

SEQ ID NO: 11530 - RNA, 22 nt, synthetic construct
  source 1..22: mol_type = other RNA
gttccggcggtagctgatgaag

SEQ ID NO: 11531 - RNA, 22 nt, synthetic construct
  source 1..22: mol_type = other RNA
gtttgccaccagtacagggcag

SEQ ID NO: 11532 - RNA, 22 nt, synthetic construct
  source 1..22: mol_type = other RNA
tacactccccgctgccctgtac

SEQ ID NO: 11533 - RNA, 22 nt, synthetic construct
  source 1..22: mol_type = other RNA
taccgccggaactcaggttccc

SEQ ID NO: 11534 - RNA, 22 nt, synthetic construct
  source 1..22: mol_type = other RNA
tactggtggcaaacccagtggg

SEQ ID NO: 11535 - RNA, 22 nt, synthetic construct
  source 1..22: mol_type = other RNA
tagctgatgaagacatctggag

SEQ ID NO: 11536 - RNA, 22 nt, synthetic construct
  source 1..22: mol_type = other RNA
tcacctggccagctgggaacct

SEQ ID NO: 11537 - RNA, 22 nt, synthetic construct
  source 1..22: mol_type = other RNA
tcagctaccgccggaactcagg

SEQ ID NO: 11538 - RNA, 22 nt, synthetic construct
  source 1..22: mol_type = other RNA
tcaggttcccagctggccaggt

SEQ ID NO: 11539 - RNA, 22 nt, synthetic construct
  source 1..22: mol_type = other RNA
tcatcagctaccgccggaactc

SEQ ID NO: 11540 - RNA, 22 nt, synthetic construct
  source 1..22: mol_type = other RNA
tccagatgtcttcatcagctac

SEQ ID NO: 11541 - RNA, 22 nt, synthetic construct
  source 1..22: mol_type = other RNA
tcccagctggccaggtgaggag

SEQ ID NO: 11542 - RNA, 22 nt, synthetic construct
  source 1..22: mol_type = other RNA
tccccactgggtttgccaccag

SEQ ID NO: 11543 - RNA, 22 nt, synthetic construct
  source 1..22: mol_type = other RNA
tccccgctgccctgtactggtg

SEQ ID NO: 11544 - RNA, 22 nt, synthetic construct
  source 1..22: mol_type = other RNA
tccggcggtagctgatgaagac

SEQ ID NO: 11545 - RNA, 22 nt, synthetic construct
  source 1..22: mol_type = other RNA
tcctcacctggccagctgggaa

SEQ ID NO: 11546 - RNA, 22 nt, synthetic construct
  source 1..22: mol_type = other RNA
tcgctgcccgcccgcccctcct

SEQ ID NO: 11547 - RNA, 22 nt, synthetic construct
  source 1..22: mol_type = other RNA
tctggagtgtccccactgggtt

SEQ ID NO: 11548 - RNA, 22 nt, synthetic construct
  source 1..22: mol_type = other RNA
tcttcatcagctaccgccggaa

SEQ ID NO: 11549 - RNA, 22 nt, synthetic construct
  source 1..22: mol_type = other RNA
tgaagacatctggagtgtcccc

SEQ ID NO: 11550 - RNA, 22 nt, synthetic construct
  source 1..22: mol_type = other RNA
tgagttccggcggtagctgatg

SEQ ID NO: 11551 - RNA, 22 nt, synthetic construct
  source 1..22: mol_type = other RNA
tgatgaagacatctggagtgtc

SEQ ID NO: 11552 - RNA, 22 nt, synthetic construct
  source 1..22: mol_type = other RNA
tgccaccagtacagggcagcgg

SEQ ID NO: 11553 - RNA, 22 nt, synthetic construct
  source 1..22: mol_type = other RNA
tgcccgcccgcccctcctcacc

SEQ ID NO: 11554 - RNA, 22 nt, synthetic construct
  source 1..22: mol_type = other RNA
tgccctgtactggtggcaaacc

SEQ ID NO: 11555 - RNA, 22 nt, synthetic construct
  source 1..22: mol_type = other RNA
tgctacactccccgctgccctg

SEQ ID NO: 11556 - RNA, 22 nt, synthetic construct
  source 1..22: mol_type = other RNA
tggagtgtccccactgggtttg

SEQ ID NO: 11557 - RNA, 22 nt, synthetic construct
  source 1..22: mol_type = other RNA
tggcaaacccagtggggacact

SEQ ID NO: 11558 - RNA, 22 nt, synthetic construct
  source 1..22: mol_type = other RNA
tggccagctgggaacctgagtt

SEQ ID NO: 11559 - RNA, 22 nt, synthetic construct
  source 1..22: mol_type = other RNA
tggccaggtgaggaggggcggg

SEQ ID NO: 11560 - RNA, 22 nt, synthetic construct
  source 1..22: mol_type = other RNA
tgggaacctgagttccggcggt

SEQ ID NO: 11561 - RNA, 22 nt, synthetic construct
  source 1..22: mol_type = other RNA
tggggacactccagatgtcttc

SEQ ID NO: 11562 - RNA, 22 nt, synthetic construct
  source 1..22: mol_type = other RNA
tgggtttgccaccagtacaggg

SEQ ID NO: 11563 - RNA, 22 nt, synthetic construct
  source 1..22: mol_type = other RNA
tggtggcaaacccagtggggac

SEQ ID NO: 11564 - RNA, 22 nt, synthetic construct
  source 1..22: mol_type = other RNA
tgtactggtggcaaacccagtg

SEQ ID NO: 11565 - RNA, 22 nt, synthetic construct
  source 1..22: mol_type = other RNA
tgtccccactgggtttgccacc

SEQ ID NO: 11566 - RNA, 22 nt, synthetic construct
  source 1..22: mol_type = other RNA
tgtcttcatcagctaccgccgg

SEQ ID NO: 11567 - RNA, 22 nt, synthetic construct
  source 1..22: mol_type = other RNA
ttcatcagctaccgccggaact

SEQ ID NO: 11568 - RNA, 22 nt, synthetic construct
  source 1..22: mol_type = other RNA
ttcccagctggccaggtgagga

SEQ ID NO: 11569 - RNA, 22 nt, synthetic construct
  source 1..22: mol_type = other RNA
ttccggcggtagctgatgaaga

SEQ ID NO: 11570 - RNA, 22 nt, synthetic construct
  source 1..22: mol_type = other RNA
ttgccaccagtacagggcagcg

SEQ ID NO: 11571 - RNA, 22 nt, synthetic construct
  source 1..22: mol_type = other RNA
tttgccaccagtacagggcagc

SEQ ID NO: 11572 - RNA, 20 nt, synthetic construct
  source 1..20: mol_type = other RNA
aaactcatccagagtgtcat

SEQ ID NO: 11573 - RNA, 20 nt, synthetic construct
  source 1..20: mol_type = other RNA
aaagttgcgggcacccatga

SEQ ID NO: 11574 - RNA, 20 nt, synthetic construct
  source 1..20: mol_type = other RNA
aacacaaagttgcgggcacc

SEQ ID NO: 11575 - RNA, 20 nt, synthetic construct
  source 1..20: mol_type = other RNA
aactcatccagagtgtcatg

SEQ ID NO: 11576 - RNA, 20 nt, synthetic construct
  source 1..20: mol_type = other RNA
aacttgcctgcttccagctt

SEQ ID NO: 11577 - RNA, 20 nt, synthetic construct
  source 1..20: mol_type = other RNA
aactttgtgttggtgctatc

SEQ ID NO: 11578 - RNA, 20 nt, synthetic construct
  source 1..20: mol_type = other RNA
aagacactgaagccatgcag

SEQ ID NO: 11579 - RNA, 20 nt, synthetic construct
  source 1..20: mol_type = other RNA
aagaccatgactgcaaggat

SEQ ID NO: 11580 - RNA, 20 nt, synthetic construct
  source 1..20: mol_type = other RNA
aagcaggcaagttcgaggac

SEQ ID NO: 11581 - RNA, 20 nt, synthetic construct
  source 1..20: mol_type = other RNA
aagcataggcaggcacctac

SEQ ID NO: 11582 - RNA, 20 nt, synthetic construct
  source 1..20: mol_type = other RNA
aagccatgcagctgcaggtg

SEQ ID NO: 11583 - RNA, 20 nt, synthetic construct
  source 1..20: mol_type = other RNA
aagctggaagcaggcaagtt

SEQ ID NO: 11584 - RNA, 20 nt, synthetic construct
  source 1..20: mol_type = other RNA
aaggattgggtgcataaggt

SEQ ID NO: 11585 - RNA, 20 nt, synthetic construct
  source 1..20: mol_type = other RNA
aaggtaggtgcctgcctatg

SEQ ID NO: 11586 - RNA, 20 nt, synthetic construct
  source 1..20: mol_type = other RNA
aaggtgcacctgcagctgca

SEQ ID NO: 11587 - RNA, 20 nt, synthetic construct
  source 1..20: mol_type = other RNA
aagtgcatgcaagaccatga

SEQ ID NO: 11588 - RNA, 20 nt, synthetic construct
  source 1..20: mol_type = other RNA
aagttcgaggacaaactcat

SEQ ID NO: 11589 - RNA, 20 nt, synthetic construct
  source 1..20: mol_type = other RNA
aagttgcgggcacccatgac

SEQ ID NO: 11590 - RNA, 20 nt, synthetic construct
  source 1..20: mol_type = other RNA
aatccttgcagtcatggtct

SEQ ID NO: 11591 - RNA, 20 nt, synthetic construct
  source 1..20: mol_type = other RNA
aatgaagacactgaagccat

SEQ ID NO: 11592 - RNA, 20 nt, synthetic construct
  source 1..20: mol_type = other RNA
acaaactcatccagagtgtc

SEQ ID NO: 11593 - RNA, 20 nt, synthetic construct
  source 1..20: mol_type = other RNA
acaaagttgcgggcacccat

SEQ ID NO: 11594 - RNA, 20 nt, synthetic construct
  source 1..20: mol_type = other RNA
acaagtgcatgcaagaccat

SEQ ID NO: 11595 - RNA, 20 nt, synthetic construct
  source 1..20: mol_type = other RNA
acacaaagttgcgggcaccc

SEQ ID NO: 11596 - RNA, 20 nt, synthetic construct
  source 1..20: mol_type = other RNA
acactctggatgagtttgtc

SEQ ID NO: 11597 - RNA, 20 nt, synthetic construct
  source 1..20: mol_type = other RNA
acactgaagccatgcagctg

SEQ ID NO: 11598 - RNA, 20 nt, synthetic construct
  source 1..20: mol_type = other RNA
acatcaatgaagacactgaa

SEQ ID NO: 11599 - RNA, 20 nt, synthetic construct
  source 1..20: mol_type = other RNA
accaacacaaagttgcgggc

SEQ ID NO: 11600 - RNA, 20 nt, synthetic construct
  source 1..20: mol_type = other RNA
accatgactgcaaggattgg

SEQ ID NO: 11601 - RNA, 20 nt, synthetic construct
  source 1..20: mol_type = other RNA
acccaatccttgcagtcatg

SEQ ID NO: 11602 - RNA, 20 nt, synthetic construct
  source 1..20: mol_type = other RNA
acccatgacactctggatga

SEQ ID NO: 11603 - RNA, 20 nt, synthetic construct
  source 1..20: mol_type = other RNA
accgcagaagcataggcagg

SEQ ID NO: 11604 - RNA, 20 nt, synthetic construct
  source 1..20: mol_type = other RNA
acctaccttatgcacccaat

SEQ ID NO: 11605 - RNA, 20 nt, synthetic construct
  source 1..20: mol_type = other RNA
acctgcagctgcatggcttc

SEQ ID NO: 11606 - RNA, 20 nt, synthetic construct
  source 1..20: mol_type = other RNA
acctggagcactggacaagt

SEQ ID NO: 11607 - RNA, 20 nt, synthetic construct
  source 1..20: mol_type = other RNA
accttatgcacccaatcctt

SEQ ID NO: 11608 - RNA, 20 nt, synthetic construct
  source 1..20: mol_type = other RNA
actcatccagagtgtcatgg

SEQ ID NO: 11609 - RNA, 20 nt, synthetic construct
  source 1..20: mol_type = other RNA
actctggatgagtttgtcct

SEQ ID NO: 11610 - RNA, 20 nt, synthetic construct
  source 1..20: mol_type = other RNA
actgaagccatgcagctgca

SEQ ID NO: 11611 - RNA, 20 nt, synthetic construct
  source 1..20: mol_type = other RNA
actgcaaggattgggtgcat

SEQ ID NO: 11612 - RNA, 20 nt, synthetic construct
  source 1..20: mol_type = other RNA
actggacaagtgcatgcaag

SEQ ID NO: 11613 - RNA, 20 nt, synthetic construct
  source 1..20: mol_type = other RNA
acttgcctgcttccagcttc

SEQ ID NO: 11614 - RNA, 20 nt, synthetic construct
  source 1..20: mol_type = other RNA
acttgtccagtgctccaggt

SEQ ID NO: 11615 - RNA, 20 nt, synthetic construct
  source 1..20: mol_type = other RNA
actttgtgttggtgctatca

SEQ ID NO: 11616 - RNA, 20 nt, synthetic construct
  source 1..20: mol_type = other RNA
agaagcataggcaggcacct

SEQ ID NO: 11617 - RNA, 20 nt, synthetic construct
  source 1..20: mol_type = other RNA
agaagctggaagcaggcaag

SEQ ID NO: 11618 - RNA, 20 nt, synthetic construct
  source 1..20: mol_type = other RNA
agacactgaagccatgcagc

SEQ ID NO: 11619 - RNA, 20 nt, synthetic construct
  source 1..20: mol_type = other RNA
agaccatgactgcaaggatt

SEQ ID NO: 11620 - RNA, 20 nt, synthetic construct
  source 1..20: mol_type = other RNA
agagtgtcatgggtgcccgc

SEQ ID NO: 11621 - RNA, 20 nt, synthetic construct
  source 1..20: mol_type = other RNA
agcaccaacacaaagttgcg

SEQ ID NO: 11622 - RNA, 20 nt, synthetic construct
  source 1..20: mol_type = other RNA
agcactggacaagtgcatgc

SEQ ID NO: 11623 - RNA, 20 nt, synthetic construct
  source 1..20: mol_type = other RNA
agcaggcaagttcgaggaca

SEQ ID NO: 11624 - RNA, 20 nt, synthetic construct
  source 1..20: mol_type = other RNA
agcataggcaggcacctacc

SEQ ID NO: 11625 - RNA, 20 nt, synthetic construct
  source 1..20: mol_type = other RNA
agccatgcagctgcaggtgc

SEQ ID NO: 11626 - RNA, 20 nt, synthetic construct
  source 1..20: mol_type = other RNA
agctgcatggcttcagtgtc

SEQ ID NO: 11627 - RNA, 20 nt, synthetic construct
  source 1..20: mol_type = other RNA
agctggaagcaggcaagttc

SEQ ID NO: 11628 - RNA, 20 nt, synthetic construct
  source 1..20: mol_type = other RNA
agcttctccacatcaatgaa

SEQ ID NO: 11629 - RNA, 20 nt, synthetic construct
  source 1..20: mol_type = other RNA
aggacaaactcatccagagt

SEQ ID NO: 11630 - RNA, 20 nt, synthetic construct
  source 1..20: mol_type = other RNA
aggattgggtgcataaggta

SEQ ID NO: 11631 - RNA, 20 nt, synthetic construct
  source 1..20: mol_type = other RNA
aggcaagttcgaggacaaac

SEQ ID NO: 11632 - RNA, 20 nt, synthetic construct
  source 1..20: mol_type = other RNA
aggcacctaccttatgcacc

SEQ ID NO: 11633 - RNA, 20 nt, synthetic construct
  source 1..20: mol_type = other RNA
aggcaggcacctaccttatg

SEQ ID NO: 11634 - RNA, 20 nt, synthetic construct
  source 1..20: mol_type = other RNA
aggtaggtgcctgcctatgc

SEQ ID NO: 11635 - RNA, 20 nt, synthetic construct
  source 1..20: mol_type = other RNA
aggtgatagcaccaacacaa

SEQ ID NO: 11636 - RNA, 20 nt, synthetic construct
  source 1..20: mol_type = other RNA
aggtgcacctgcagctgcat

SEQ ID NO: 11637 - RNA, 20 nt, synthetic construct
  source 1..20: mol_type = other RNA
agtcatggtcttgcatgcac

SEQ ID NO: 11638 - RNA, 20 nt, synthetic construct
  source 1..20: mol_type = other RNA
agtgcatgcaagaccatgac

SEQ ID NO: 11639 - RNA, 20 nt, synthetic construct
  source 1..20: mol_type = other RNA
agtgctccaggtgatagcac

SEQ ID NO: 11640 - RNA, 20 nt, synthetic construct
  source 1..20: mol_type = other RNA
agtgtcatgggtgcccgcaa

SEQ ID NO: 11641 - RNA, 20 nt, synthetic construct
  source 1..20: mol_type = other RNA
agtgtcttcattgatgtgga

SEQ ID NO: 11642 - RNA, 20 nt, synthetic construct
  source 1..20: mol_type = other RNA
agttcgaggacaaactcatc

SEQ ID NO: 11643 - RNA, 20 nt, synthetic construct
  source 1..20: mol_type = other RNA
agttgcgggcacccatgaca

SEQ ID NO: 11644 - RNA, 20 nt, synthetic construct
  source 1..20: mol_type = other RNA
agtttgtcctcgaacttgcc

SEQ ID NO: 11645 - RNA, 20 nt, synthetic construct
  source 1..20: mol_type = other RNA
ataaggtaggtgcctgccta

SEQ ID NO: 11646 - RNA, 20 nt, synthetic construct
  source 1..20: mol_type = other RNA
atagcaccaacacaaagttg

SEQ ID NO: 11647 - RNA, 20 nt, synthetic construct
  source 1..20: mol_type = other RNA
ataggcaggcacctacctta

SEQ ID NO: 11648 - RNA, 20 nt, synthetic construct
  source 1..20: mol_type = other RNA
atcaatgaagacactgaagc

SEQ ID NO: 11649 - RNA, 20 nt, synthetic construct
  source 1..20: mol_type = other RNA
atcacctggagcactggaca

SEQ ID NO: 11650 - RNA, 20 nt, synthetic construct
  source 1..20: mol_type = other RNA
atccagagtgtcatgggtgc

SEQ ID NO: 11651 - RNA, 20 nt, synthetic construct
  source 1..20: mol_type = other RNA
atccttgcagtcatggtctt

SEQ ID NO: 11652 - RNA, 20 nt, synthetic construct
  source 1..20: mol_type = other RNA
atgaagacactgaagccatg

SEQ ID NO: 11653 - RNA, 20 nt, synthetic construct
  source 1..20: mol_type = other RNA
atgacactctggatgagttt

SEQ ID NO: 11654 - RNA, 20 nt, synthetic construct
  source 1..20: mol_type = other RNA
atgactgcaaggattgggtg

SEQ ID NO: 11655 - RNA, 20 nt, synthetic construct
  source 1..20: mol_type = other RNA
atgagtttgtcctcgaactt

SEQ ID NO: 11656 - RNA, 20 nt, synthetic construct
  source 1..20: mol_type = other RNA
atgcaagaccatgactgcaa

SEQ ID NO: 11657 - RNA, 20 nt, synthetic construct
  source 1..20: mol_type = other RNA
atgcacccaatccttgcagt

SEQ ID NO: 11658 - RNA, 20 nt, synthetic construct
  source 1..20: mol_type = other RNA
atgcacttgtccagtgctcc

SEQ ID NO: 11659 - RNA, 20 nt, synthetic construct
  source 1..20: mol_type = other RNA
atgcagctgcaggtgcacct

SEQ ID NO: 11660 - RNA, 20 nt, synthetic construct
  source 1..20: mol_type = other RNA
atggcttcagtgtcttcatt

SEQ ID NO: 11661 - RNA, 20 nt, synthetic construct
  source 1..20: mol_type = other RNA
atgggtgcccgcaactttgt

SEQ ID NO: 11662 - RNA, 20 nt, synthetic construct
  source 1..20: mol_type = other RNA
atggtcttgcatgcacttgt

SEQ ID NO: 11663 - RNA, 20 nt, synthetic construct
  source 1..20: mol_type = other RNA
atgtggagaagctggaagca

SEQ ID NO: 11664 - RNA, 20 nt, synthetic construct
  source 1..20: mol_type = other RNA
attgatgtggagaagctgga

SEQ ID NO: 11665 - RNA, 20 nt, synthetic construct
  source 1..20: mol_type = other RNA
attgggtgcataaggtaggt

SEQ ID NO: 11666 - RNA, 20 nt, synthetic construct
  source 1..20: mol_type = other RNA
caaactcatccagagtgtca

SEQ ID NO: 11667 - RNA, 20 nt, synthetic construct
  source 1..20: mol_type = other RNA
caaagttgcgggcacccatg

SEQ ID NO: 11668 - RNA, 20 nt, synthetic construct
  source 1..20: mol_type = other RNA
caacacaaagttgcgggcac

SEQ ID NO: 11669 - RNA, 20 nt, synthetic construct
  source 1..20: mol_type = other RNA
caactttgtgttggtgctat

SEQ ID NO: 11670 - RNA, 20 nt, synthetic construct
  source 1..20: mol_type = other RNA
caagaccatgactgcaagga

SEQ ID NO: 11671 - RNA, 20 nt, synthetic construct
  source 1..20: mol_type = other RNA
caaggattgggtgcataagg

SEQ ID NO: 11672 - RNA, 20 nt, synthetic construct
  source 1..20: mol_type = other RNA
caagtgcatgcaagaccatg

SEQ ID NO: 11673 - RNA, 20 nt, synthetic construct
  source 1..20: mol_type = other RNA
caagttcgaggacaaactca

SEQ ID NO: 11674 - RNA, 20 nt, synthetic construct
  source 1..20: mol_type = other RNA
caatccttgcagtcatggtc

SEQ ID NO: 11675 - RNA, 20 nt, synthetic construct
  source 1..20: mol_type = other RNA
caatgaagacactgaagcca

SEQ ID NO: 11676 - RNA, 20 nt, synthetic construct
  source 1..20: mol_type = other RNA
cacaaagttgcgggcaccca

SEQ ID NO: 11677 - RNA, 20 nt, synthetic construct
  source 1..20: mol_type = other RNA
cacatcaatgaagacactga

SEQ ID NO: 11678 - RNA, 20 nt, synthetic construct
  source 1..20: mol_type = other RNA
caccaacacaaagttgcggg

SEQ ID NO: 11679 - RNA, 20 nt, synthetic construct
  source 1..20: mol_type = other RNA
cacccaatccttgcagtcat

SEQ ID NO: 11680 - RNA, 20 nt, synthetic construct
  source 1..20: mol_type = other RNA
cacccatgacactctggatg

SEQ ID NO: 11681 - RNA, 20 nt, synthetic construct
  source 1..20: mol_type = other RNA
cacctaccttatgcacccaa

SEQ ID NO: 11682 - RNA, 20 nt, synthetic construct
  source 1..20: mol_type = other RNA
cacctgcagctgcatggctt

SEQ ID NO: 11683 - RNA, 20 nt, synthetic construct
  source 1..20: mol_type = other RNA
cacctggagcactggacaag

SEQ ID NO: 11684 - RNA, 20 nt, synthetic construct
  source 1..20: mol_type = other RNA
cactctggatgagtttgtcc

SEQ ID NO: 11685 - RNA, 20 nt, synthetic construct
  source 1..20: mol_type = other RNA
cactgaagccatgcagctgc

SEQ ID NO: 11686 - RNA, 20 nt, synthetic construct
  source 1..20: mol_type = other RNA
cactggacaagtgcatgcaa

SEQ ID NO: 11687 - RNA, 20 nt, synthetic construct
  source 1..20: mol_type = other RNA
cacttgtccagtgctccagg

SEQ ID NO: 11688 - RNA, 20 nt, synthetic construct
  source 1..20: mol_type = other RNA
cagaagcataggcaggcacc

SEQ ID NO: 11689 - RNA, 20 nt, synthetic construct
  source 1..20: mol_type = other RNA
cagagtgtcatgggtgcccg

SEQ ID NO: 11690 - RNA, 20 nt, synthetic construct
  source 1..20: mol_type = other RNA
cagctgcatggcttcagtgt

SEQ ID NO: 11691 - RNA, 20 nt, synthetic construct
  source 1..20: mol_type = other RNA
cagcttctccacatcaatga

SEQ ID NO: 11692 - RNA, 20 nt, synthetic construct
  source 1..20: mol_type = other RNA
caggcaagttcgaggacaaa

SEQ ID NO: 11693 - RNA, 20 nt, synthetic construct
  source 1..20: mol_type = other RNA
caggcacctaccttatgcac

SEQ ID NO: 11694 - RNA, 20 nt, synthetic construct
  source 1..20: mol_type = other RNA
caggtgatagcaccaacaca

SEQ ID NO: 11695 - RNA, 20 nt, synthetic construct
  source 1..20: mol_type = other RNA
cagtcatggtcttgcatgca

SEQ ID NO: 11696 - RNA, 20 nt, synthetic construct
  source 1..20: mol_type = other RNA
cagtgctccaggtgatagca

SEQ ID NO: 11697 - RNA, 20 nt, synthetic construct
  source 1..20: mol_type = other RNA
cagtgtcttcattgatgtgg

SEQ ID NO: 11698 - RNA, 20 nt, synthetic construct
  source 1..20: mol_type = other RNA
cataaggtaggtgcctgcct

SEQ ID NO: 11699 - RNA, 20 nt, synthetic construct
  source 1..20: mol_type = other RNA
cataggcaggcacctacctt

SEQ ID NO: 11700 - RNA, 20 nt, synthetic construct
  source 1..20: mol_type = other RNA
catcaatgaagacactgaag

SEQ ID NO: 11701 - RNA, 20 nt, synthetic construct
  source 1..20: mol_type = other RNA
catccagagtgtcatgggtg

SEQ ID NO: 11702 - RNA, 20 nt, synthetic construct
  source 1..20: mol_type = other RNA
catgacactctggatgagtt

SEQ ID NO: 11703 - RNA, 20 nt, synthetic construct
  source 1..20: mol_type = other RNA
catgactgcaaggattgggt

SEQ ID NO: 11704 - RNA, 20 nt, synthetic construct
  source 1..20: mol_type = other RNA
catgcaagaccatgactgca

SEQ ID NO: 11705 - RNA, 20 nt, synthetic construct
  source 1..20: mol_type = other RNA
catgcacttgtccagtgctc

SEQ ID NO: 11706 - RNA, 20 nt, synthetic construct
  source 1..20: mol_type = other RNA
catgcagctgcaggtgcacc

SEQ ID NO: 11707 - RNA, 20 nt, synthetic construct
  source 1..20: mol_type = other RNA
catggcttcagtgtcttcat

SEQ ID NO: 11708 - RNA, 20 nt, synthetic construct
  source 1..20: mol_type = other RNA
catgggtgcccgcaactttg

SEQ ID NO: 11709 - RNA, 20 nt, synthetic construct
  source 1..20: mol_type = other RNA
catggtcttgcatgcacttg

SEQ ID NO: 11710 - RNA, 20 nt, synthetic construct
  source 1..20: mol_type = other RNA
cattgatgtggagaagctgg

SEQ ID NO: 11711 - RNA, 20 nt, synthetic construct
  source 1..20: mol_type = other RNA
ccaacacaaagttgcgggca

SEQ ID NO: 11712 - RNA, 20 nt, synthetic construct
  source 1..20: mol_type = other RNA
ccaatccttgcagtcatggt

SEQ ID NO: 11713 - RNA, 20 nt, synthetic construct
  source 1..20: mol_type = other RNA
ccacatcaatgaagacactg

SEQ ID NO: 11714 - RNA, 20 nt, synthetic construct
  source 1..20: mol_type = other RNA
ccagagtgtcatgggtgccc

SEQ ID NO: 11715 - RNA, 20 nt, synthetic construct
  source 1..20: mol_type = other RNA
ccagcttctccacatcaatg

SEQ ID NO: 11716 - RNA, 20 nt, synthetic construct
  source 1..20: mol_type = other RNA
ccaggtgatagcaccaacac

SEQ ID NO: 11717 - RNA, 20 nt, synthetic construct
  source 1..20: mol_type = other RNA
ccagtgctccaggtgatagc

SEQ ID NO: 11718 - RNA, 20 nt, synthetic construct
  source 1..20: mol_type = other RNA
ccatgacactctggatgagt

SEQ ID NO: 11719 - RNA, 20 nt, synthetic construct
  source 1..20: mol_type = other RNA
ccatgactgcaaggattggg

SEQ ID NO: 11720 - RNA, 20 nt, synthetic construct
  source 1..20: mol_type = other RNA
ccatgcagctgcaggtgcac

SEQ ID NO: 11721 - RNA, 20 nt, synthetic construct
  source 1..20: mol_type = other RNA
cccaatccttgcagtcatgg

SEQ ID NO: 11722 - RNA, 20 nt, synthetic construct
  source 1..20: mol_type = other RNA
cccatgacactctggatgag

SEQ ID NO: 11723 - RNA, 20 nt, synthetic construct
  source 1..20: mol_type = other RNA
cccgcaactttgtgttggtg

SEQ ID NO: 11724 - RNA, 20 nt, synthetic construct
  source 1..20: mol_type = other RNA
ccgcaactttgtgttggtgc

SEQ ID NO: 11725 - RNA, 20 nt, synthetic construct
  source 1..20: mol_type = other RNA
ccgcagaagcataggcaggc

SEQ ID NO: 11726 - RNA, 20 nt, synthetic construct
  source 1..20: mol_type = other RNA
cctaccttatgcacccaatc

SEQ ID NO: 11727 - RNA, 20 nt, synthetic construct
  source 1..20: mol_type = other RNA
cctcgaacttgcctgcttcc

SEQ ID NO: 11728 - RNA, 20 nt, synthetic construct
  source 1..20: mol_type = other RNA
cctgaaggtgcacctgcagc

SEQ ID NO: 11729 - RNA, 20 nt, synthetic construct
  source 1..20: mol_type = other RNA
cctgcagctgcatggcttca

SEQ ID NO: 11730 - RNA, 20 nt, synthetic construct
  source 1..20: mol_type = other RNA
cctgcttccagcttctccac

SEQ ID NO: 11731 - RNA, 20 nt, synthetic construct
  source 1..20: mol_type = other RNA
cctggagcactggacaagtg

SEQ ID NO: 11732 - RNA, 20 nt, synthetic construct
  source 1..20: mol_type = other RNA
ccttatgcacccaatccttg

SEQ ID NO: 11733 - RNA, 20 nt, synthetic construct
  source 1..20: mol_type = other RNA
ccttgcagtcatggtcttgc

SEQ ID NO: 11734 - RNA, 20 nt, synthetic construct
  source 1..20: mol_type = other RNA
cgaacttgcctgcttccagc

SEQ ID NO: 11735 - RNA, 20 nt, synthetic construct
  source 1..20: mol_type = other RNA
cgaggacaaactcatccaga

SEQ ID NO: 11736 - RNA, 20 nt, synthetic construct
  source 1..20: mol_type = other RNA
cgcaactttgtgttggtgct

SEQ ID NO: 11737 - RNA, 20 nt, synthetic construct
  source 1..20: mol_type = other RNA
cgcagaagcataggcaggca

SEQ ID NO: 11738 - RNA, 20 nt, synthetic construct
  source 1..20: mol_type = other RNA
cgggcacccatgacactctg

SEQ ID NO: 11739 - RNA, 20 nt, synthetic construct
  source 1..20: mol_type = other RNA
ctaccttatgcacccaatcc

SEQ ID NO: 11740 - RNA, 20 nt, synthetic construct
  source 1..20: mol_type = other RNA
ctatcacctggagcactgga

SEQ ID NO: 11741 - RNA, 20 nt, synthetic construct
  source 1..20: mol_type = other RNA
ctcatccagagtgtcatggg

SEQ ID NO: 11742 - RNA, 20 nt, synthetic construct
  source 1..20: mol_type = other RNA
ctccacatcaatgaagacac

SEQ ID NO: 11743 - RNA, 20 nt, synthetic construct
  source 1..20: mol_type = other RNA
ctccaggtgatagcaccaac

SEQ ID NO: 11744 - RNA, 20 nt, synthetic construct
  source 1..20: mol_type = other RNA
ctcctgaaggtgcacctgca

SEQ ID NO: 11745 - RNA, 20 nt, synthetic construct
  source 1..20: mol_type = other RNA
ctcgaacttgcctgcttcca

SEQ ID NO: 11746 - RNA, 20 nt, synthetic construct
  source 1..20: mol_type = other RNA
ctctggatgagtttgtcctc

SEQ ID NO: 11747 - RNA, 20 nt, synthetic construct
  source 1..20: mol_type = other RNA
ctgaagccatgcagctgcag

SEQ ID NO: 11748 - RNA, 20 nt, synthetic construct
  source 1..20: mol_type = other RNA
ctgaaggtgcacctgcagct

SEQ ID NO: 11749 - RNA, 20 nt, synthetic construct
  source 1..20: mol_type = other RNA
ctgcaaggattgggtgcata

SEQ ID NO: 11750 - RNA, 20 nt, synthetic construct
  source 1..20: mol_type = other RNA
ctgcagctgcatggcttcag

SEQ ID NO: 11751 - RNA, 20 nt, synthetic construct
  source 1..20: mol_type = other RNA
ctgcatggcttcagtgtctt

SEQ ID NO: 11752 - RNA, 20 nt, synthetic construct
  source 1..20: mol_type = other RNA
ctgcttccagcttctccaca

SEQ ID NO: 11753 - RNA, 20 nt, synthetic construct
  source 1..20: mol_type = other RNA
ctggaagcaggcaagttcga

SEQ ID NO: 11754 - RNA, 20 nt, synthetic construct
  source 1..20: mol_type = other RNA
ctggacaagtgcatgcaaga

SEQ ID NO: 11755 - RNA, 20 nt, synthetic construct
  source 1..20: mol_type = other RNA
ctggagcactggacaagtgc

SEQ ID NO: 11756 - RNA, 20 nt, synthetic construct
  source 1..20: mol_type = other RNA
ctggatgagtttgtcctcga

SEQ ID NO: 11757 - RNA, 20 nt, synthetic construct
  source 1..20: mol_type = other RNA
cttatgcacccaatccttgc

SEQ ID NO: 11758 - RNA, 20 nt, synthetic construct
  source 1..20: mol_type = other RNA
cttcagtgtcttcattgatg

SEQ ID NO: 11759 - RNA, 20 nt, synthetic construct
  source 1..20: mol_type = other RNA
cttcattgatgtggagaagc

SEQ ID NO: 11760 - RNA, 20 nt, synthetic construct
  source 1..20: mol_type = other RNA
cttccagcttctccacatca

SEQ ID NO: 11761 - RNA, 20 nt, synthetic construct
  source 1..20: mol_type = other RNA
cttctccacatcaatgaaga

SEQ ID NO: 11762 - RNA, 20 nt, synthetic construct
  source 1..20: mol_type = other RNA
cttgcagtcatggtcttgca

SEQ ID NO: 11763 - RNA, 20 nt, synthetic construct
  source 1..20: mol_type = other RNA
cttgcatgcacttgtccagt

SEQ ID NO: 11764 - RNA, 20 nt, synthetic construct
  source 1..20: mol_type = other RNA
cttgcctgcttccagcttct

SEQ ID NO: 11765 - RNA, 20 nt, synthetic construct
  source 1..20: mol_type = other RNA
cttgtccagtgctccaggtg

SEQ ID NO: 11766 - RNA, 20 nt, synthetic construct
  source 1..20: mol_type = other RNA
ctttgtgttggtgctatcac

SEQ ID NO: 11767 - RNA, 20 nt, synthetic construct
  source 1..20: mol_type = other RNA
gaacttgcctgcttccagct

SEQ ID NO: 11768 - RNA, 20 nt, synthetic construct
  source 1..20: mol_type = other RNA
gaagacactgaagccatgca

SEQ ID NO: 11769 - RNA, 20 nt, synthetic construct
  source 1..20: mol_type = other RNA
gaagcaggcaagttcgagga

SEQ ID NO: 11770 - RNA, 20 nt, synthetic construct
  source 1..20: mol_type = other RNA
gaagcataggcaggcaccta

SEQ ID NO: 11771 - RNA, 20 nt, synthetic construct
  source 1..20: mol_type = other RNA
gaagccatgcagctgcaggt

SEQ ID NO: 11772 - RNA, 20 nt, synthetic construct
  source 1..20: mol_type = other RNA
gaagctggaagcaggcaagt

SEQ ID NO: 11773 - RNA, 20 nt, synthetic construct
  source 1..20: mol_type = other RNA
gaaggtgcacctgcagctgc

SEQ ID NO: 11774 - RNA, 20 nt, synthetic construct
  source 1..20: mol_type = other RNA
gacaaactcatccagagtgt

SEQ ID NO: 11775 - RNA, 20 nt, synthetic construct
  source 1..20: mol_type = other RNA
gacaagtgcatgcaagacca

SEQ ID NO: 11776 - RNA, 20 nt, synthetic construct
  source 1..20: mol_type = other RNA
gacactctggatgagtttgt

SEQ ID NO: 11777 - RNA, 20 nt, synthetic construct
  source 1..20: mol_type = other RNA
gacactgaagccatgcagct

SEQ ID NO: 11778 - RNA, 20 nt, synthetic construct
  source 1..20: mol_type = other RNA
gaccatgactgcaaggattg

SEQ ID NO: 11779 - RNA, 20 nt, synthetic construct
  source 1..20: mol_type = other RNA
gaccgcagaagcataggcag

SEQ ID NO: 11780 - RNA, 20 nt, synthetic construct
  source 1..20: mol_type = other RNA
gactgcaaggattgggtgca

SEQ ID NO: 11781 - RNA, 20 nt, synthetic construct
  source 1..20: mol_type = other RNA
gagaagctggaagcaggcaa

SEQ ID NO: 11782 - RNA, 20 nt, synthetic construct
  source 1..20: mol_type = other RNA
gagcactggacaagtgcatg

SEQ ID NO: 11783 - RNA, 20 nt, synthetic construct
  source 1..20: mol_type = other RNA
gaggacaaactcatccagag

SEQ ID NO: 11784 - RNA, 20 nt, synthetic construct
  source 1..20: mol_type = other RNA
gagtgtcatgggtgcccgca

SEQ ID NO: 11785 - RNA, 20 nt, synthetic construct
  source 1..20: mol_type = other RNA
gagtttgtcctcgaacttgc

SEQ ID NO: 11786 - RNA, 20 nt, synthetic construct
  source 1..20: mol_type = other RNA
gatagcaccaacacaaagtt

SEQ ID NO: 11787 - RNA, 20 nt, synthetic construct
  source 1..20: mol_type = other RNA
gatgagtttgtcctcgaact

SEQ ID NO: 11788 - RNA, 20 nt, synthetic construct
  source 1..20: mol_type = other RNA
gatgtggagaagctggaagc

SEQ ID NO: 11789 - RNA, 20 nt, synthetic construct
  source 1..20: mol_type = other RNA
gattgggtgcataaggtagg

SEQ ID NO: 11790 - RNA, 20 nt, synthetic construct
  source 1..20: mol_type = other RNA
gcaactttgtgttggtgcta

SEQ ID NO: 11791 - RNA, 20 nt, synthetic construct
  source 1..20: mol_type = other RNA
gcaagaccatgactgcaagg

SEQ ID NO: 11792 - RNA, 20 nt, synthetic construct
  source 1..20: mol_type = other RNA
gcaaggattgggtgcataag

SEQ ID NO: 11793 - RNA, 20 nt, synthetic construct
  source 1..20: mol_type = other RNA
gcaagttcgaggacaaactc

SEQ ID NO: 11794 - RNA, 20 nt, synthetic construct
  source 1..20: mol_type = other RNA
gcaccaacacaaagttgcgg

SEQ ID NO: 11795 - RNA, 20 nt, synthetic construct
  source 1..20: mol_type = other RNA
gcacccaatccttgcagtca

SEQ ID NO: 11796 - RNA, 20 nt, synthetic construct
  source 1..20: mol_type = other RNA
gcacccatgacactctggat

SEQ ID NO: 11797 - RNA, 20 nt, synthetic construct
  source 1..20: mol_type = other RNA
gcacctaccttatgcaccca

SEQ ID NO: 11798 - RNA, 20 nt, synthetic construct
  source 1..20: mol_type = other RNA
gcacctgcagctgcatggct

SEQ ID NO: 11799 - RNA, 20 nt, synthetic construct
  source 1..20: mol_type = other RNA
gcactggacaagtgcatgca

SEQ ID NO: 11800 - RNA, 20 nt, synthetic construct
  source 1..20: mol_type = other RNA
gcacttgtccagtgctccag

SEQ ID NO: 11801 - RNA, 20 nt, synthetic construct
  source 1..20: mol_type = other RNA
gcagaagcataggcaggcac

SEQ ID NO: 11802 - RNA, 20 nt, synthetic construct
  source 1..20: mol_type = other RNA
gcagctgcatggcttcagtg

SEQ ID NO: 11803 - RNA, 20 nt, synthetic construct
  source 1..20: mol_type = other RNA
gcaggcaagttcgaggacaa

SEQ ID NO: 11804 - RNA, 20 nt, synthetic construct
  source 1..20: mol_type = other RNA
gcaggcacctaccttatgca

SEQ ID NO: 11805 - RNA, 20 nt, synthetic construct
  source 1..20: mol_type = other RNA
gcagtcatggtcttgcatgc

SEQ ID NO: 11806 - RNA, 20 nt, synthetic construct
  source 1..20: mol_type = other RNA
gcataaggtaggtgcctgcc

SEQ ID NO: 11807 - RNA, 20 nt, synthetic construct
  source 1..20: mol_type = other RNA
gcataggcaggcacctacct

SEQ ID NO: 11808 - RNA, 20 nt, synthetic construct
  source 1..20: mol_type = other RNA
gcatgcaagaccatgactgc

SEQ ID NO: 11809 - RNA, 20 nt, synthetic construct
  source 1..20: mol_type = other RNA
gcatgcacttgtccagtgct

SEQ ID NO: 11810 - RNA, 20 nt, synthetic construct
  source 1..20: mol_type = other RNA
gcatggcttcagtgtcttca

SEQ ID NO: 11811 - RNA, 20 nt, synthetic construct
  source 1..20: mol_type = other RNA
gccatgcagctgcaggtgca

SEQ ID NO: 11812 - RNA, 20 nt, synthetic construct
  source 1..20: mol_type = other RNA
gcccgcaactttgtgttggt

SEQ ID NO: 11813 - RNA, 20 nt, synthetic construct
  source 1..20: mol_type = other RNA
gcctgcttccagcttctcca

SEQ ID NO: 11814 - RNA, 20 nt, synthetic construct
  source 1..20: mol_type = other RNA
gcgggcacccatgacactct

SEQ ID NO: 11815 - RNA, 20 nt, synthetic construct
  source 1..20: mol_type = other RNA
gctatcacctggagcactgg

SEQ ID NO: 11816 - RNA, 20 nt, synthetic construct
  source 1..20: mol_type = other RNA
gctccaggtgatagcaccaa

SEQ ID NO: 11817 - RNA, 20 nt, synthetic construct
  source 1..20: mol_type = other RNA
gctgcatggcttcagtgtct

SEQ ID NO: 11818 - RNA, 20 nt, synthetic construct
  source 1..20: mol_type = other RNA
gctggaagcaggcaagttcg

SEQ ID NO: 11819 - RNA, 20 nt, synthetic construct
  source 1..20: mol_type = other RNA
gcttcagtgtcttcattgat

SEQ ID NO: 11820 - RNA, 20 nt, synthetic construct
  source 1..20: mol_type = other RNA
gcttccagcttctccacatc

SEQ ID NO: 11821 - RNA, 20 nt, synthetic construct
  source 1..20: mol_type = other RNA
gcttctccacatcaatgaag

SEQ ID NO: 11822 - RNA, 20 nt, synthetic construct
  source 1..20: mol_type = other RNA
ggaagcaggcaagttcgagg

SEQ ID NO: 11823 - RNA, 20 nt, synthetic construct
  source 1..20: mol_type = other RNA
ggacaaactcatccagagtg

SEQ ID NO: 11824 - RNA, 20 nt, synthetic construct
  source 1..20: mol_type = other RNA
ggacaagtgcatgcaagacc

SEQ ID NO: 11825 - RNA, 20 nt, synthetic construct
  source 1..20: mol_type = other RNA
ggagaagctggaagcaggca

SEQ ID NO: 11826 - RNA, 20 nt, synthetic construct
  source 1..20: mol_type = other RNA
ggagcactggacaagtgcat

SEQ ID NO: 11827 - RNA, 20 nt, synthetic construct
  source 1..20: mol_type = other RNA
ggatgagtttgtcctcgaac

SEQ ID NO: 11828 - RNA, 20 nt, synthetic construct
  source 1..20: mol_type = other RNA
ggattgggtgcataaggtag

SEQ ID NO: 11829 - RNA, 20 nt, synthetic construct
  source 1..20: mol_type = other RNA
ggcaagttcgaggacaaact

SEQ ID NO: 11830 - RNA, 20 nt, synthetic construct
  source 1..20: mol_type = other RNA
ggcacccatgacactctgga

SEQ ID NO: 11831 - RNA, 20 nt, synthetic construct
  source 1..20: mol_type = other RNA
ggcacctaccttatgcaccc

SEQ ID NO: 11832 - RNA, 20 nt, synthetic construct
  source 1..20: mol_type = other RNA
ggcaggcacctaccttatgc

SEQ ID NO: 11833 - RNA, 20 nt, synthetic construct
  source 1..20: mol_type = other RNA
ggcttcagtgtcttcattga

SEQ ID NO: 11834 - RNA, 20 nt, synthetic construct
  source 1..20: mol_type = other RNA
gggcacccatgacactctgg

SEQ ID NO: 11835 - RNA, 20 nt, synthetic construct
  source 1..20: mol_type = other RNA
gggtgcataaggtaggtgcc

SEQ ID NO: 11836 - RNA, 20 nt, synthetic construct
  source 1..20: mol_type = other RNA
gggtgcccgcaactttgtgt

SEQ ID NO: 11837 - RNA, 20 nt, synthetic construct
  source 1..20: mol_type = other RNA
ggtaggtgcctgcctatgct

SEQ ID NO: 11838 - RNA, 20 nt, synthetic construct
  source 1..20: mol_type = other RNA
ggtcttgcatgcacttgtcc

SEQ ID NO: 11839 - RNA, 20 nt, synthetic construct
  source 1..20: mol_type = other RNA
ggtgatagcaccaacacaaa

SEQ ID NO: 11840 - RNA, 20 nt, synthetic construct
  source 1..20: mol_type = other RNA
ggtgcacctgcagctgcatg

SEQ ID NO: 11841 - RNA, 20 nt, synthetic construct
  source 1..20: mol_type = other RNA
ggtgcataaggtaggtgcct

SEQ ID NO: 11842 - RNA, 20 nt, synthetic construct
  source 1..20: mol_type = other RNA
ggtgcccgcaactttgtgtt

SEQ ID NO: 11843 - RNA, 20 nt, synthetic construct
  source 1..20: mol_type = other RNA
ggtgctatcacctggagcac

SEQ ID NO: 11844 - RNA, 20 nt, synthetic construct
  source 1..20: mol_type = other RNA
gtaggtgcctgcctatgctt

SEQ ID NO: 11845 - RNA, 20 nt, synthetic construct
  source 1..20: mol_type = other RNA
gtcatgggtgcccgcaactt

SEQ ID NO: 11846 - RNA, 20 nt, synthetic construct
  source 1..20: mol_type = other RNA
gtcatggtcttgcatgcact

SEQ ID NO: 11847 - RNA, 20 nt, synthetic construct
  source 1..20: mol_type = other RNA
gtccagtgctccaggtgata

SEQ ID NO: 11848 - RNA, 20 nt, synthetic construct
  source 1..20: mol_type = other RNA
gtcctcgaacttgcctgctt

SEQ ID NO: 11849 - RNA, 20 nt, synthetic construct
  source 1..20: mol_type = other RNA
gtcttcattgatgtggagaa

SEQ ID NO: 11850 - RNA, 20 nt, synthetic construct
  source 1..20: mol_type = other RNA
gtcttgcatgcacttgtcca

SEQ ID NO: 11851 - RNA, 20 nt, synthetic construct
  source 1..20: mol_type = other RNA
gtgatagcaccaacacaaag

SEQ ID NO: 11852 - RNA, 20 nt, synthetic construct
  source 1..20: mol_type = other RNA
gtgcacctgcagctgcatgg

SEQ ID NO: 11853 - RNA, 20 nt, synthetic construct
  source 1..20: mol_type = other RNA
gtgcataaggtaggtgcctg

SEQ ID NO: 11854 - RNA, 20 nt, synthetic construct
  source 1..20: mol_type = other RNA
gtgcatgcaagaccatgact

SEQ ID NO: 11855 - RNA, 20 nt, synthetic construct
  source 1..20: mol_type = other RNA
gtgcccgcaactttgtgttg

SEQ ID NO: 11856 - RNA, 20 nt, synthetic construct
  source 1..20: mol_type = other RNA
gtgctatcacctggagcact

SEQ ID NO: 11857 - RNA, 20 nt, synthetic construct
  source 1..20: mol_type = other RNA
gtgctccaggtgatagcacc

SEQ ID NO: 11858 - RNA, 20 nt, synthetic construct
  source 1..20: mol_type = other RNA
gtggagaagctggaagcagg

SEQ ID NO: 11859 - RNA, 20 nt, synthetic construct
  source 1..20: mol_type = other RNA
gtgtcatgggtgcccgcaac

SEQ ID NO: 11860 - RNA, 20 nt, synthetic construct
  source 1..20: mol_type = other RNA
gtgtcttcattgatgtggag

SEQ ID NO: 11861 - RNA, 20 nt, synthetic construct
  source 1..20: mol_type = other RNA
gtgttggtgctatcacctgg

SEQ ID NO: 11862 - RNA, 20 nt, synthetic construct
  source 1..20: mol_type = other RNA
gttcgaggacaaactcatcc

SEQ ID NO: 11863 - RNA, 20 nt, synthetic construct
  source 1..20: mol_type = other RNA
gttgcgggcacccatgacac

SEQ ID NO: 11864 - RNA, 20 nt, synthetic construct
  source 1..20: mol_type = other RNA
gttggtgctatcacctggag

SEQ ID NO: 11865 - RNA, 20 nt, synthetic construct
  source 1..20: mol_type = other RNA
gtttgtcctcgaacttgcct

SEQ ID NO: 11866 - RNA, 20 nt, synthetic construct
  source 1..20: mol_type = other RNA
taaggtaggtgcctgcctat

SEQ ID NO: 11867 - RNA, 20 nt, synthetic construct
  source 1..20: mol_type = other RNA
taccttatgcacccaatcct

SEQ ID NO: 11868 - RNA, 20 nt, synthetic construct
  source 1..20: mol_type = other RNA
tagcaccaacacaaagttgc

SEQ ID NO: 11869 - RNA, 20 nt, synthetic construct
  source 1..20: mol_type = other RNA
taggcaggcacctaccttat

SEQ ID NO: 11870 - RNA, 20 nt, synthetic construct
  source 1..20: mol_type = other RNA
tatcacctggagcactggac

SEQ ID NO: 11871 - RNA, 20 nt, synthetic construct
  source 1..20: mol_type = other RNA
tatgcacccaatccttgcag

SEQ ID NO: 11872 - RNA, 20 nt, synthetic construct
  source 1..20: mol_type = other RNA
tcaatgaagacactgaagcc

SEQ ID NO: 11873 - RNA, 20 nt, synthetic construct
  source 1..20: mol_type = other RNA
tcacctggagcactggacaa

SEQ ID NO: 11874 - RNA, 20 nt, synthetic construct
  source 1..20: mol_type = other RNA
tcagtgtcttcattgatgtg

SEQ ID NO: 11875 - RNA, 20 nt, synthetic construct
  source 1..20: mol_type = other RNA
tcatccagagtgtcatgggt

SEQ ID NO: 11876 - RNA, 20 nt, synthetic construct
  source 1..20: mol_type = other RNA
tcatgggtgcccgcaacttt

SEQ ID NO: 11877 - RNA, 20 nt, synthetic construct
  source 1..20: mol_type = other RNA
tcatggtcttgcatgcactt

SEQ ID NO: 11878 - RNA, 20 nt, synthetic construct
  source 1..20: mol_type = other RNA
tcattgatgtggagaagctg

SEQ ID NO: 11879 - RNA, 20 nt, synthetic construct
  source 1..20: mol_type = other RNA
tccacatcaatgaagacact

SEQ ID NO: 11880 - RNA, 20 nt, synthetic construct
  source 1..20: mol_type = other RNA
tccagagtgtcatgggtgcc

SEQ ID NO: 11881 - RNA, 20 nt, synthetic construct
  source 1..20: mol_type = other RNA
tccagcttctccacatcaat

SEQ ID NO: 11882 - RNA, 20 nt, synthetic construct
  source 1..20: mol_type = other RNA
tccaggtgatagcaccaaca

SEQ ID NO: 11883 - RNA, 20 nt, synthetic construct
  source 1..20: mol_type = other RNA
tccagtgctccaggtgatag

SEQ ID NO: 11884 - RNA, 20 nt, synthetic construct
  source 1..20: mol_type = other RNA
tcctcgaacttgcctgcttc

SEQ ID NO: 11885 - RNA, 20 nt, synthetic construct
  source 1..20: mol_type = other RNA
tcctgaaggtgcacctgcag

SEQ ID NO: 11886 - RNA, 20 nt, synthetic construct
  source 1..20: mol_type = other RNA
tccttgcagtcatggtcttg

SEQ ID NO: 11887 - RNA, 20 nt, synthetic construct
  source 1..20: mol_type = other RNA
tcgaacttgcctgcttccag

SEQ ID NO: 11888 - RNA, 20 nt, synthetic construct
  source 1..20: mol_type = other RNA
tcgaggacaaactcatccag

SEQ ID NO: 11889 - RNA, 20 nt, synthetic construct
  source 1..20: mol_type = other RNA
tctccacatcaatgaagaca

SEQ ID NO: 11890 - RNA, 20 nt, synthetic construct
  source 1..20: mol_type = other RNA
tctcctgaaggtgcacctgc

SEQ ID NO: 11891 - RNA, 20 nt, synthetic construct
  source 1..20: mol_type = other RNA
tctggatgagtttgtcctcg

SEQ ID NO: 11892 - RNA, 20 nt, synthetic construct
  source 1..20: mol_type = other RNA
tcttcattgatgtggagaag

SEQ ID NO: 11893 - RNA, 20 nt, synthetic construct
  source 1..20: mol_type = other RNA
tcttgcatgcacttgtccag

SEQ ID NO: 11894 - RNA, 20 nt, synthetic construct
  source 1..20: mol_type = other RNA
tgaagacactgaagccatgc

SEQ ID NO: 11895 - RNA, 20 nt, synthetic construct
  source 1..20: mol_type = other RNA
tgaagccatgcagctgcagg

SEQ ID NO: 11896 - RNA, 20 nt, synthetic construct
  source 1..20: mol_type = other RNA
tgaaggtgcacctgcagctg

SEQ ID NO: 11897 - RNA, 20 nt, synthetic construct
  source 1..20: mol_type = other RNA
tgacactctggatgagtttg

SEQ ID NO: 11898 - RNA, 20 nt, synthetic construct
  source 1..20: mol_type = other RNA
tgactgcaaggattgggtgc

SEQ ID NO: 11899 - RNA, 20 nt, synthetic construct
  source 1..20: mol_type = other RNA
tgagtttgtcctcgaacttg

SEQ ID NO: 11900 - RNA, 20 nt, synthetic construct
  source 1..20: mol_type = other RNA
tgatagcaccaacacaaagt

SEQ ID NO: 11901 - RNA, 20 nt, synthetic construct
  source 1..20: mol_type = other RNA
tgatgtggagaagctggaag

SEQ ID NO: 11902 - RNA, 20 nt, synthetic construct
  source 1..20: mol_type = other RNA
tgcaagaccatgactgcaag

SEQ ID NO: 11903 - RNA, 20 nt, synthetic construct
  source 1..20: mol_type = other RNA
tgcaaggattgggtgcataa

SEQ ID NO: 11904 - RNA, 20 nt, synthetic construct
  source 1..20: mol_type = other RNA
tgcacccaatccttgcagtc

SEQ ID NO: 11905 - RNA, 20 nt, synthetic construct
  source 1..20: mol_type = other RNA
tgcacctgcagctgcatggc

SEQ ID NO: 11906 - RNA, 20 nt, synthetic construct
  source 1..20: mol_type = other RNA
tgcacttgtccagtgctcca

SEQ ID NO: 11907 - RNA, 20 nt, synthetic construct
  source 1..20: mol_type = other RNA
tgcagctgcatggcttcagt

SEQ ID NO: 11908 - RNA, 20 nt, synthetic construct
  source 1..20: mol_type = other RNA
tgcagtcatggtcttgcatg

SEQ ID NO: 11909 - RNA, 20 nt, synthetic construct
  source 1..20: mol_type = other RNA
tgcataaggtaggtgcctgc

SEQ ID NO: 11910 - RNA, 20 nt, synthetic construct
  source 1..20: mol_type = other RNA
tgcatgcaagaccatgactg

SEQ ID NO: 11911 - RNA, 20 nt, synthetic construct
  source 1..20: mol_type = other RNA
tgcatgcacttgtccagtgc

SEQ ID NO: 11912 - RNA, 20 nt, synthetic construct
  source 1..20: mol_type = other RNA
tgcatggcttcagtgtcttc

SEQ ID NO: 11913 - RNA, 20 nt, synthetic construct
  source 1..20: mol_type = other RNA
tgcccgcaactttgtgttgg

SEQ ID NO: 11914 - RNA, 20 nt, synthetic construct
  source 1..20: mol_type = other RNA
tgcctgcttccagcttctcc

SEQ ID NO: 11915 - RNA, 20 nt, synthetic construct
  source 1..20: mol_type = other RNA
tgcgggcacccatgacactc

SEQ ID NO: 11916 - RNA, 20 nt, synthetic construct
  source 1..20: mol_type = other RNA
tgctatcacctggagcactg

SEQ ID NO: 11917 - RNA, 20 nt, synthetic construct
  source 1..20: mol_type = other RNA
tgctccaggtgatagcacca

SEQ ID NO: 11918 - RNA, 20 nt, synthetic construct
  source 1..20: mol_type = other RNA
tgcttccagcttctccacat

SEQ ID NO: 11919 - RNA, 20 nt, synthetic construct
  source 1..20: mol_type = other RNA
tggaagcaggcaagttcgag

SEQ ID NO: 11920 - RNA, 20 nt, synthetic construct
  source 1..20: mol_type = other RNA
tggacaagtgcatgcaagac

SEQ ID NO: 11921 - RNA, 20 nt, synthetic construct
  source 1..20: mol_type = other RNA
tggagaagctggaagcaggc

SEQ ID NO: 11922 - RNA, 20 nt, synthetic construct
  source 1..20: mol_type = other RNA
tggagcactggacaagtgca

SEQ ID NO: 11923 - RNA, 20 nt, synthetic construct
  source 1..20: mol_type = other RNA
tggatgagtttgtcctcgaa

SEQ ID NO: 11924 - RNA, 20 nt, synthetic construct
  source 1..20: mol_type = other RNA
tggcttcagtgtcttcattg

SEQ ID NO: 11925 - RNA, 20 nt, synthetic construct
  source 1..20: mol_type = other RNA
tgggtgcataaggtaggtgc

SEQ ID NO: 11926 - RNA, 20 nt, synthetic construct
  source 1..20: mol_type = other RNA
tgggtgcccgcaactttgtg

SEQ ID NO: 11927 - RNA, 20 nt, synthetic construct
  source 1..20: mol_type = other RNA
tggtcttgcatgcacttgtc

SEQ ID NO: 11928 - RNA, 20 nt, synthetic construct
  source 1..20: mol_type = other RNA
tggtgctatcacctggagca

SEQ ID NO: 11929 - RNA, 20 nt, synthetic construct
  source 1..20: mol_type = other RNA
tgtcatgggtgcccgcaact

SEQ ID NO: 11930 - RNA, 20 nt, synthetic construct
  source 1..20: mol_type = other RNA
tgtccagtgctccaggtgat

SEQ ID NO: 11931 - RNA, 20 nt, synthetic construct
  source 1..20: mol_type = other RNA
tgtcctcgaacttgcctgct

SEQ ID NO: 11932 - RNA, 20 nt, synthetic construct
  source 1..20: mol_type = other RNA
tgtcttcattgatgtggaga

SEQ ID NO: 11933 - RNA, 20 nt, synthetic construct
  source 1..20: mol_type = other RNA
tgtggagaagctggaagcag

SEQ ID NO: 11934 - RNA, 20 nt, synthetic construct
  source 1..20: mol_type = other RNA
tgtgttggtgctatcacctg

SEQ ID NO: 11935 - RNA, 20 nt, synthetic construct
  source 1..20: mol_type = other RNA
tgttggtgctatcacctgga

SEQ ID NO: 11936 - RNA, 20 nt, synthetic construct
  source 1..20: mol_type = other RNA
ttatgcacccaatccttgca

SEQ ID NO: 11937 - RNA, 20 nt, synthetic construct
  source 1..20: mol_type = other RNA
ttcagtgtcttcattgatgt

SEQ ID NO: 11938 - RNA, 20 nt, synthetic construct
  source 1..20: mol_type = other RNA
ttcattgatgtggagaagct

SEQ ID NO: 11939 - RNA, 20 nt, synthetic construct
  source 1..20: mol_type = other RNA
ttccagcttctccacatcaa

SEQ ID NO: 11940 - RNA, 20 nt, synthetic construct
  source 1..20: mol_type = other RNA
ttcgaggacaaactcatcca

SEQ ID NO: 11941 - RNA, 20 nt, synthetic construct
  source 1..20: mol_type = other RNA
ttctccacatcaatgaagac

SEQ ID NO: 11942 - RNA, 20 nt, synthetic construct
  source 1..20: mol_type = other RNA
ttgatgtggagaagctggaa

SEQ ID NO: 11943 - RNA, 20 nt, synthetic construct
  source 1..20: mol_type = other RNA
ttgcagtcatggtcttgcat

SEQ ID NO: 11944 - RNA, 20 nt, synthetic construct
  source 1..20: mol_type = other RNA
ttgcatgcacttgtccagtg

SEQ ID NO: 11945 - RNA, 20 nt, synthetic construct
  source 1..20: mol_type = other RNA
ttgcctgcttccagcttctc

SEQ ID NO: 11946 - RNA, 20 nt, synthetic construct
  source 1..20: mol_type = other RNA
ttgcgggcacccatgacact

SEQ ID NO: 11947 - RNA, 20 nt, synthetic construct
  source 1..20: mol_type = other RNA
ttgggtgcataaggtaggtg

SEQ ID NO: 11948 - RNA, 20 nt, synthetic construct
  source 1..20: mol_type = other RNA
ttggtgctatcacctggagc

SEQ ID NO: 11949 - RNA, 20 nt, synthetic construct
  source 1..20: mol_type = other RNA
ttgtccagtgctccaggtga

SEQ ID NO: 11950 - RNA, 20 nt, synthetic construct
  source 1..20: mol_type = other RNA
ttgtcctcgaacttgcctgc

SEQ ID NO: 11951 - RNA, 20 nt, synthetic construct
  source 1..20: mol_type = other RNA
ttgtgttggtgctatcacct

SEQ ID NO: 11952 - RNA, 20 nt, synthetic construct
  source 1..20: mol_type = other RNA
tttgtcctcgaacttgcctg

SEQ ID NO: 11953 - RNA, 20 nt, synthetic construct
  source 1..20: mol_type = other RNA
tttgtgttggtgctatcacc

SEQ ID NO: 11954 - RNA, 21 nt, synthetic construct
  source 1..21: mol_type = other RNA
aaactcatccagagtgtcatg

SEQ ID NO: 11955 - RNA, 21 nt, synthetic construct
  source 1..21: mol_type = other RNA
aaagttgcgggcacccatgac

SEQ ID NO: 11956 - RNA, 21 nt, synthetic construct
  source 1..21: mol_type = other RNA
aacacaaagttgcgggcaccc

SEQ ID NO: 11957 - RNA, 21 nt, synthetic construct
  source 1..21: mol_type = other RNA
aactcatccagagtgtcatgg

SEQ ID NO: 11958 - RNA, 21 nt, synthetic construct
  source 1..21: mol_type = other RNA
aacttgcctgcttccagcttc

SEQ ID NO: 11959 - RNA, 21 nt, synthetic construct
  source 1..21: mol_type = other RNA
aactttgtgttggtgctatca

SEQ ID NO: 11960 - RNA, 21 nt, synthetic construct
  source 1..21: mol_type = other RNA
aagacactgaagccatgcagc

SEQ ID NO: 11961 - RNA, 21 nt, synthetic construct
  source 1..21: mol_type = other RNA
aagaccatgactgcaaggatt

SEQ ID NO: 11962 - RNA, 21 nt, synthetic construct
  source 1..21: mol_type = other RNA
aagcaggcaagttcgaggaca

SEQ ID NO: 11963 - RNA, 21 nt, synthetic construct
  source 1..21: mol_type = other RNA
aagcataggcaggcacctacc

SEQ ID NO: 11964 - RNA, 21 nt, synthetic construct
  source 1..21: mol_type = other RNA
aagccatgcagctgcaggtgc

SEQ ID NO: 11965 - RNA, 21 nt, synthetic construct
  source 1..21: mol_type = other RNA
aagctggaagcaggcaagttc

SEQ ID NO: 11966 - RNA, 21 nt, synthetic construct
  source 1..21: mol_type = other RNA
aaggattgggtgcataaggta

SEQ ID NO: 11967 - RNA, 21 nt, synthetic construct
  source 1..21: mol_type = other RNA
aaggtaggtgcctgcctatgc

SEQ ID NO: 11968 - RNA, 21 nt, synthetic construct
  source 1..21: mol_type = other RNA
aaggtgcacctgcagctgcat

SEQ ID NO: 11969 - RNA, 21 nt, synthetic construct
  source 1..21: mol_type = other RNA
aagtgcatgcaagaccatgac

SEQ ID NO: 11970 - RNA, 21 nt, synthetic construct
  source 1..21: mol_type = other RNA
aagttcgaggacaaactcatc

SEQ ID NO: 11971 - RNA, 21 nt, synthetic construct
  source 1..21: mol_type = other RNA
aagttgcgggcacccatgaca

SEQ ID NO: 11972 - RNA, 21 nt, synthetic construct
  source 1..21: mol_type = other RNA
aatccttgcagtcatggtctt

SEQ ID NO: 11973 - RNA, 21 nt, synthetic construct
  source 1..21: mol_type = other RNA
aatgaagacactgaagccatg

SEQ ID NO: 11974 - RNA, 21 nt, synthetic construct
  source 1..21: mol_type = other RNA
acaaactcatccagagtgtca

SEQ ID NO: 11975 - RNA, 21 nt, synthetic construct
  source 1..21: mol_type = other RNA
acaaagttgcgggcacccatg

SEQ ID NO: 11976 - RNA, 21 nt, synthetic construct
  source 1..21: mol_type = other RNA
acaagtgcatgcaagaccatg

SEQ ID NO: 11977 - RNA, 21 nt, synthetic construct
  source 1..21: mol_type = other RNA
acacaaagttgcgggcaccca

SEQ ID NO: 11978 - RNA, 21 nt, synthetic construct
  source 1..21: mol_type = other RNA
acactctggatgagtttgtcc

SEQ ID NO: 11979 - RNA, 21 nt, synthetic construct
  source 1..21: mol_type = other RNA
acactgaagccatgcagctgc

SEQ ID NO: 11980 - RNA, 21 nt, synthetic construct
  source 1..21: mol_type = other RNA
acatcaatgaagacactgaag

SEQ ID NO: 11981 - RNA, 21 nt, synthetic construct
  source 1..21: mol_type = other RNA
accaacacaaagttgcgggca

SEQ ID NO: 11982 - RNA, 21 nt, synthetic construct
  source 1..21: mol_type = other RNA
accatgactgcaaggattggg

SEQ ID NO: 11983 - RNA, 21 nt, synthetic construct
  source 1..21: mol_type = other RNA
acccaatccttgcagtcatgg

SEQ ID NO: 11984 - RNA, 21 nt, synthetic construct
  source 1..21: mol_type = other RNA
acccatgacactctggatgag

SEQ ID NO: 11985 - RNA, 21 nt, synthetic construct
  source 1..21: mol_type = other RNA
accgcagaagcataggcaggc

SEQ ID NO: 11986 - RNA, 21 nt, synthetic construct
  source 1..21: mol_type = other RNA
acctaccttatgcacccaatc

SEQ ID NO: 11987 - RNA, 21 nt, synthetic construct
  source 1..21: mol_type = other RNA
acctgcagctgcatggcttca

SEQ ID NO: 11988 - RNA, 21 nt, synthetic construct
  source 1..21: mol_type = other RNA
acctggagcactggacaagtg

SEQ ID NO: 11989 - RNA, 21 nt, synthetic construct
  source 1..21: mol_type = other RNA
accttatgcacccaatccttg

SEQ ID NO: 11990 - RNA, 21 nt, synthetic construct
  source 1..21: mol_type = other RNA
actcatccagagtgtcatggg

SEQ ID NO: 11991 - RNA, 21 nt, synthetic construct
  source 1..21: mol_type = other RNA
actctggatgagtttgtcctc

SEQ ID NO: 11992 - RNA, 21 nt, synthetic construct
  source 1..21: mol_type = other RNA
actgaagccatgcagctgcag

SEQ ID NO: 11993 - RNA, 21 nt, synthetic construct
  source 1..21: mol_type = other RNA
actgcaaggattgggtgcata

SEQ ID NO: 11994 - RNA, 21 nt, synthetic construct
  source 1..21: mol_type = other RNA
actggacaagtgcatgcaaga

SEQ ID NO: 11995 - RNA, 21 nt, synthetic construct
  source 1..21: mol_type = other RNA
acttgcctgcttccagcttct

SEQ ID NO: 11996 - RNA, 21 nt, synthetic construct
  source 1..21: mol_type = other RNA
acttgtccagtgctccaggtg

SEQ ID NO: 11997 - RNA, 21 nt, synthetic construct
  source 1..21: mol_type = other RNA
actttgtgttggtgctatcac

SEQ ID NO: 11998 - RNA, 21 nt, synthetic construct
  source 1..21: mol_type = other RNA
agaagcataggcaggcaccta

SEQ ID NO: 11999 - RNA, 21 nt, synthetic construct
  source 1..21: mol_type = other RNA
agaagctggaagcaggcaagt

SEQ ID NO: 12000 - RNA, 21 nt, synthetic construct
  source 1..21: mol_type = other RNA
agacactgaagccatgcagct

SEQ ID NO: 12001 - RNA, 21 nt, synthetic construct
  source 1..21: mol_type = other RNA
agaccatgactgcaaggattg

SEQ ID NO: 12002 - RNA, 21 nt, synthetic construct
  source 1..21: mol_type = other RNA
agagtgtcatgggtgcccgca

SEQ ID NO: 12003 - RNA, 21 nt, synthetic construct
  source 1..21: mol_type = other RNA
agcaccaacacaaagttgcgg

SEQ ID NO: 12004 - RNA, 21 nt, synthetic construct
  source 1..21: mol_type = other RNA
agcactggacaagtgcatgca

SEQ ID NO: 12005 - RNA, 21 nt, synthetic construct
  source 1..21: mol_type = other RNA
agcaggcaagttcgaggacaa

SEQ ID NO: 12006 - RNA, 21 nt, synthetic construct
  source 1..21: mol_type = other RNA
agcataggcaggcacctacct

SEQ ID NO: 12007 - RNA, 21 nt, synthetic construct
  source 1..21: mol_type = other RNA
agccatgcagctgcaggtgca

SEQ ID NO: 12008 - RNA, 21 nt, synthetic construct
  source 1..21: mol_type = other RNA
agctgcatggcttcagtgtct

SEQ ID NO: 12009 - RNA, 21 nt, synthetic construct
  source 1..21: mol_type = other RNA
agctggaagcaggcaagttcg

SEQ ID NO: 12010 - RNA, 21 nt, synthetic construct
  source 1..21: mol_type = other RNA
agcttctccacatcaatgaag

SEQ ID NO: 12011 - RNA, 21 nt, synthetic construct
  source 1..21: mol_type = other RNA
aggacaaactcatccagagtg

SEQ ID NO: 12012 - RNA, 21 nt, synthetic construct
  source 1..21: mol_type = other RNA
aggattgggtgcataaggtag

SEQ ID NO: 12013 - RNA, 21 nt, synthetic construct
  source 1..21: mol_type = other RNA
aggcaagttcgaggacaaact

SEQ ID NO: 12014 - RNA, 21 nt, synthetic construct
  source 1..21: mol_type = other RNA
aggcacctaccttatgcaccc

SEQ ID NO: 12015 - RNA, 21 nt, synthetic construct
  source 1..21: mol_type = other RNA
aggcaggcacctaccttatgc

SEQ ID NO: 12016 - RNA, 21 nt, synthetic construct
  source 1..21: mol_type = other RNA
aggtaggtgcctgcctatgct

SEQ ID NO: 12017 - RNA, 21 nt, synthetic construct
  source 1..21: mol_type = other RNA
aggtgatagcaccaacacaaa

SEQ ID NO: 12018 - RNA, 21 nt, synthetic construct
  source 1..21: mol_type = other RNA
aggtgcacctgcagctgcatg

SEQ ID NO: 12019 - RNA, 21 nt, synthetic construct
  source 1..21: mol_type = other RNA
agtcatggtcttgcatgcact

SEQ ID NO: 12020 - RNA, 21 nt, synthetic construct
  source 1..21: mol_type = other RNA
agtgcatgcaagaccatgact

SEQ ID NO: 12021 - RNA, 21 nt, synthetic construct
  source 1..21: mol_type = other RNA
agtgctccaggtgatagcacc

SEQ ID NO: 12022 - RNA, 21 nt, synthetic construct
  source 1..21: mol_type = other RNA
agtgtcatgggtgcccgcaac

SEQ ID NO: 12023 - RNA, 21 nt, synthetic construct
  source 1..21: mol_type = other RNA
agtgtcttcattgatgtggag

SEQ ID NO: 12024 - RNA, 21 nt, synthetic construct
  source 1..21: mol_type = other RNA
agttcgaggacaaactcatcc

SEQ ID NO: 12025 - RNA, 21 nt, synthetic construct
  source 1..21: mol_type = other RNA
agttgcgggcacccatgacac

SEQ ID NO: 12026 - RNA, 21 nt, synthetic construct
  source 1..21: mol_type = other RNA
agtttgtcctcgaacttgcct

SEQ ID NO: 12027 - RNA, 21 nt, synthetic construct
  source 1..21: mol_type = other RNA
ataaggtaggtgcctgcctat

SEQ ID NO: 12028 - RNA, 21 nt, synthetic construct
  source 1..21: mol_type = other RNA
atagcaccaacacaaagttgc

SEQ ID NO: 12029 - RNA, 21 nt, synthetic construct
  source 1..21: mol_type = other RNA
ataggcaggcacctaccttat

SEQ ID NO: 12030 - RNA, 21 nt, synthetic construct
  source 1..21: mol_type = other RNA
atcaatgaagacactgaagcc

SEQ ID NO: 12031 - RNA, 21 nt, synthetic construct
  source 1..21: mol_type = other RNA
atcacctggagcactggacaa

SEQ ID NO: 12032 - RNA, 21 nt, synthetic construct
  source 1..21: mol_type = other RNA
atccagagtgtcatgggtgcc

SEQ ID NO: 12033 - RNA, 21 nt, synthetic construct
  source 1..21: mol_type = other RNA
atccttgcagtcatggtcttg

SEQ ID NO: 12034 - RNA, 21 nt, synthetic construct
  source 1..21: mol_type = other RNA
atgaagacactgaagccatgc

SEQ ID NO: 12035 - RNA, 21 nt, synthetic construct
  source 1..21: mol_type = other RNA
atgacactctggatgagtttg

SEQ ID NO: 12036 - RNA, 21 nt, synthetic construct
  source 1..21: mol_type = other RNA
atgactgcaaggattgggtgc

SEQ ID NO: 12037 - RNA, 21 nt, synthetic construct
  source 1..21: mol_type = other RNA
atgagtttgtcctcgaacttg

SEQ ID NO: 12038 - RNA, 21 nt, synthetic construct
  source 1..21: mol_type = other RNA
atgcaagaccatgactgcaag

SEQ ID NO: 12039 - RNA, 21 nt, synthetic construct
  source 1..21: mol_type = other RNA
atgcacccaatccttgcagtc

SEQ ID NO: 12040 - RNA, 21 nt, synthetic construct
  source 1..21: mol_type = other RNA
atgcacttgtccagtgctcca

SEQ ID NO: 12041 - RNA, 21 nt, synthetic construct
  source 1..21: mol_type = other RNA
atggcttcagtgtcttcattg

SEQ ID NO: 12042 - RNA, 21 nt, synthetic construct
  source 1..21: mol_type = other RNA
atgggtgcccgcaactttgtg

SEQ ID NO: 12043 - RNA, 21 nt, synthetic construct
  source 1..21: mol_type = other RNA
atggtcttgcatgcacttgtc

SEQ ID NO: 12044 - RNA, 21 nt, synthetic construct
  source 1..21: mol_type = other RNA
atgtggagaagctggaagcag

SEQ ID NO: 12045 - RNA, 21 nt, synthetic construct
  source 1..21: mol_type = other RNA
attgatgtggagaagctggaa

SEQ ID NO: 12046 - RNA, 21 nt, synthetic construct
  source 1..21: mol_type = other RNA
attgggtgcataaggtaggtg

SEQ ID NO: 12047 - RNA, 21 nt, synthetic construct
  source 1..21: mol_type = other RNA
caaactcatccagagtgtcat

SEQ ID NO: 12048 - RNA, 21 nt, synthetic construct
  source 1..21: mol_type = other RNA
caaagttgcgggcacccatga

SEQ ID NO: 12049 - RNA, 21 nt, synthetic construct
  source 1..21: mol_type = other RNA
caacacaaagttgcgggcacc

SEQ ID NO: 12050 - RNA, 21 nt, synthetic construct
  source 1..21: mol_type = other RNA
caactttgtgttggtgctatc

SEQ ID NO: 12051 - RNA, 21 nt, synthetic construct
  source 1..21: mol_type = other RNA
caagaccatgactgcaaggat

SEQ ID NO: 12052 - RNA, 21 nt, synthetic construct
  source 1..21: mol_type = other RNA
caaggattgggtgcataaggt

SEQ ID NO: 12053 - RNA, 21 nt, synthetic construct
  source 1..21: mol_type = other RNA
caagtgcatgcaagaccatga

SEQ ID NO: 12054 - RNA, 21 nt, synthetic construct
  source 1..21: mol_type = other RNA
caagttcgaggacaaactcat

SEQ ID NO: 12055 - RNA, 21 nt, synthetic construct
  source 1..21: mol_type = other RNA
caatccttgcagtcatggtct

SEQ ID NO: 12056 - RNA, 21 nt, synthetic construct
  source 1..21: mol_type = other RNA
caatgaagacactgaagccat

SEQ ID NO: 12057 - RNA, 21 nt, synthetic construct
  source 1..21: mol_type = other RNA
cacaaagttgcgggcacccat

SEQ ID NO: 12058 - RNA, 21 nt, synthetic construct
  source 1..21: mol_type = other RNA
cacatcaatgaagacactgaa

SEQ ID NO: 12059 - RNA, 21 nt, synthetic construct
  source 1..21: mol_type = other RNA
caccaacacaaagttgcgggc

SEQ ID NO: 12060 - RNA, 21 nt, synthetic construct
  source 1..21: mol_type = other RNA
cacccaatccttgcagtcatg

SEQ ID NO: 12061 - RNA, 21 nt, synthetic construct
  source 1..21: mol_type = other RNA
cacccatgacactctggatga

SEQ ID NO: 12062 - RNA, 21 nt, synthetic construct
  source 1..21: mol_type = other RNA
cacctaccttatgcacccaat

SEQ ID NO: 12063 - RNA, 21 nt, synthetic construct
  source 1..21: mol_type = other RNA
cacctgcagctgcatggcttc

SEQ ID NO: 12064 - RNA, 21 nt, synthetic construct
  source 1..21: mol_type = other RNA
cacctggagcactggacaagt

SEQ ID NO: 12065 - RNA, 21 nt, synthetic construct
  source 1..21: mol_type = other RNA
cactctggatgagtttgtcct

SEQ ID NO: 12066 - RNA, 21 nt, synthetic construct
  source 1..21: mol_type = other RNA
cactgaagccatgcagctgca

SEQ ID NO: 12067 - RNA, 21 nt, synthetic construct
  source 1..21: mol_type = other RNA
cactggacaagtgcatgcaag

SEQ ID NO: 12068 - RNA, 21 nt, synthetic construct
  source 1..21: mol_type = other RNA
cacttgtccagtgctccaggt

SEQ ID NO: 12069 - RNA, 21 nt, synthetic construct
  source 1..21: mol_type = other RNA
cagaagcataggcaggcacct

SEQ ID NO: 12070 - RNA, 21 nt, synthetic construct
  source 1..21: mol_type = other RNA
cagagtgtcatgggtgcccgc

SEQ ID NO: 12071 - RNA, 21 nt, synthetic construct
  source 1..21: mol_type = other RNA
cagctgcatggcttcagtgtc

SEQ ID NO: 12072 - RNA, 21 nt, synthetic construct
  source 1..21: mol_type = other RNA
cagcttctccacatcaatgaa

SEQ ID NO: 12073 - RNA, 21 nt, synthetic construct
  source 1..21: mol_type = other RNA
caggcaagttcgaggacaaac

SEQ ID NO: 12074 - RNA, 21 nt, synthetic construct
  source 1..21: mol_type = other RNA
caggcacctaccttatgcacc

SEQ ID NO: 12075 - RNA, 21 nt, synthetic construct
  source 1..21: mol_type = other RNA
caggtgatagcaccaacacaa

SEQ ID NO: 12076 - RNA, 21 nt, synthetic construct
  source 1..21: mol_type = other RNA
cagtcatggtcttgcatgcac

SEQ ID NO: 12077 - RNA, 21 nt, synthetic construct
  source 1..21: mol_type = other RNA
cagtgctccaggtgatagcac

SEQ ID NO: 12078 - RNA, 21 nt, synthetic construct
  source 1..21: mol_type = other RNA
cagtgtcttcattgatgtgga

SEQ ID NO: 12079 - RNA, 21 nt, synthetic construct
  source 1..21: mol_type = other RNA
cataaggtaggtgcctgccta

SEQ ID NO: 12080 - RNA, 21 nt, synthetic construct
  source 1..21: mol_type = other RNA
cataggcaggcacctacctta

SEQ ID NO: 12081 - RNA, 21 nt, synthetic construct
  source 1..21: mol_type = other RNA
catcaatgaagacactgaagc

SEQ ID NO: 12082 - RNA, 21 nt, synthetic construct
  source 1..21: mol_type = other RNA
catccagagtgtcatgggtgc

SEQ ID NO: 12083 - RNA, 21 nt, synthetic construct
  source 1..21: mol_type = other RNA
catgacactctggatgagttt

SEQ ID NO: 12084 - RNA, 21 nt, synthetic construct
  source 1..21: mol_type = other RNA
catgactgcaaggattgggtg

SEQ ID NO: 12085 - RNA, 21 nt, synthetic construct
  source 1..21: mol_type = other RNA
catgcaagaccatgactgcaa

SEQ ID NO: 12086 - RNA, 21 nt, synthetic construct
  source 1..21: mol_type = other RNA
catgcacttgtccagtgctcc

SEQ ID NO: 12087 - RNA, 21 nt, synthetic construct
  source 1..21: mol_type = other RNA
catgcagctgcaggtgcacct

SEQ ID NO: 12088 - RNA, 21 nt, synthetic construct
  source 1..21: mol_type = other RNA
catggcttcagtgtcttcatt

SEQ ID NO: 12089 - RNA, 21 nt, synthetic construct
  source 1..21: mol_type = other RNA
catgggtgcccgcaactttgt

SEQ ID NO: 12090 - RNA, 21 nt, synthetic construct
  source 1..21: mol_type = other RNA
catggtcttgcatgcacttgt

SEQ ID NO: 12091 - RNA, 21 nt, synthetic construct
  source 1..21: mol_type = other RNA
cattgatgtggagaagctgga

SEQ ID NO: 12092 - RNA, 21 nt, synthetic construct
  source 1..21: mol_type = other RNA
ccaacacaaagttgcgggcac

SEQ ID NO: 12093 - RNA, 21 nt, synthetic construct
  source 1..21: mol_type = other RNA
ccaatccttgcagtcatggtc

SEQ ID NO: 12094 - RNA, 21 nt, synthetic construct
  source 1..21: mol_type = other RNA
ccacatcaatgaagacactga

SEQ ID NO: 12095 - RNA, 21 nt, synthetic construct
  source 1..21: mol_type = other RNA
ccagagtgtcatgggtgcccg

SEQ ID NO: 12096 - RNA, 21 nt, synthetic construct
  source 1..21: mol_type = other RNA
ccagcttctccacatcaatga

SEQ ID NO: 12097 - RNA, 21 nt, synthetic construct
  source 1..21: mol_type = other RNA
ccaggtgatagcaccaacaca

SEQ ID NO: 12098 - RNA, 21 nt, synthetic construct
  source 1..21: mol_type = other RNA
ccagtgctccaggtgatagca

SEQ ID NO: 12099 - RNA, 21 nt, synthetic construct
  source 1..21: mol_type = other RNA
ccatgacactctggatgagtt

SEQ ID NO: 12100 - RNA, 21 nt, synthetic construct
  source 1..21: mol_type = other RNA
ccatgactgcaaggattgggt

SEQ ID NO: 12101 - RNA, 21 nt, synthetic construct
  source 1..21: mol_type = other RNA
ccatgcagctgcaggtgcacc

SEQ ID NO: 12102 - RNA, 21 nt, synthetic construct
  source 1..21: mol_type = other RNA
cccaatccttgcagtcatggt

SEQ ID NO: 12103 - RNA, 21 nt, synthetic construct
  source 1..21: mol_type = other RNA
cccatgacactctggatgagt

SEQ ID NO: 12104 - RNA, 21 nt, synthetic construct
  source 1..21: mol_type = other RNA
cccgcaactttgtgttggtgc

SEQ ID NO: 12105 - RNA, 21 nt, synthetic construct
  source 1..21: mol_type = other RNA
ccgcaactttgtgttggtgct

SEQ ID NO: 12106 - RNA, 21 nt, synthetic construct
  source 1..21: mol_type = other RNA
ccgcagaagcataggcaggca

SEQ ID NO: 12107 - RNA, 21 nt, synthetic construct
  source 1..21: mol_type = other RNA
cctaccttatgcacccaatcc

SEQ ID NO: 12108 - RNA, 21 nt, synthetic construct
  source 1..21: mol_type = other RNA
cctcgaacttgcctgcttcca

SEQ ID NO: 12109 - RNA, 21 nt, synthetic construct
  source 1..21: mol_type = other RNA
cctgaaggtgcacctgcagct

SEQ ID NO: 12110 - RNA, 21 nt, synthetic construct
  source 1..21: mol_type = other RNA
cctgcagctgcatggcttcag

SEQ ID NO: 12111 - RNA, 21 nt, synthetic construct
  source 1..21: mol_type = other RNA
cctgcttccagcttctccaca

SEQ ID NO: 12112 - RNA, 21 nt, synthetic construct
  source 1..21: mol_type = other RNA
cctggagcactggacaagtgc

SEQ ID NO: 12113 - RNA, 21 nt, synthetic construct
  source 1..21: mol_type = other RNA
ccttatgcacccaatccttgc

SEQ ID NO: 12114 - RNA, 21 nt, synthetic construct
  source 1..21: mol_type = other RNA
ccttgcagtcatggtcttgca

SEQ ID NO: 12115 - RNA, 21 nt, synthetic construct
  source 1..21: mol_type = other RNA
cgaacttgcctgcttccagct

SEQ ID NO: 12116 - RNA, 21 nt, synthetic construct
  source 1..21: mol_type = other RNA
cgaggacaaactcatccagag

SEQ ID NO: 12117 - RNA, 21 nt, synthetic construct
  source 1..21: mol_type = other RNA
cgcaactttgtgttggtgcta

SEQ ID NO: 12118 - RNA, 21 nt, synthetic construct
  source 1..21: mol_type = other RNA
cgcagaagcataggcaggcac

SEQ ID NO: 12119 - RNA, 21 nt, synthetic construct
  source 1..21: mol_type = other RNA
cgggcacccatgacactctgg

SEQ ID NO: 12120 - RNA, 21 nt, synthetic construct
  source 1..21: mol_type = other RNA
ctaccttatgcacccaatcct

SEQ ID NO: 12121 - RNA, 21 nt, synthetic construct
  source 1..21: mol_type = other RNA
ctatcacctggagcactggac

SEQ ID NO: 12122 - RNA, 21 nt, synthetic construct
  source 1..21: mol_type = other RNA
ctcatccagagtgtcatgggt

SEQ ID NO: 12123 - RNA, 21 nt, synthetic construct
  source 1..21: mol_type = other RNA
ctccacatcaatgaagacact

SEQ ID NO: 12124 - RNA, 21 nt, synthetic construct
  source 1..21: mol_type = other RNA
ctccaggtgatagcaccaaca

SEQ ID NO: 12125 - RNA, 21 nt, synthetic construct
  source 1..21: mol_type = other RNA
ctcctgaaggtgcacctgcag

SEQ ID NO: 12126 - RNA, 21 nt, synthetic construct
  source 1..21: mol_type = other RNA
ctcgaacttgcctgcttccag

SEQ ID NO: 12127 - RNA, 21 nt, synthetic construct
  source 1..21: mol_type = other RNA
ctctggatgagtttgtcctcg

SEQ ID NO: 12128 - RNA, 21 nt, synthetic construct
  source 1..21: mol_type = other RNA
ctgaagccatgcagctgcagg

SEQ ID NO: 12129 - RNA, 21 nt, synthetic construct
  source 1..21: mol_type = other RNA
ctgaaggtgcacctgcagctg

SEQ ID NO: 12130 - RNA, 21 nt, synthetic construct
  source 1..21: mol_type = other RNA
ctgcaaggattgggtgcataa

SEQ ID NO: 12131 - RNA, 21 nt, synthetic construct
  source 1..21: mol_type = other RNA
ctgcagctgcatggcttcagt

SEQ ID NO: 12132 - RNA, 21 nt, synthetic construct
  source 1..21: mol_type = other RNA
ctgcatggcttcagtgtcttc

SEQ ID NO: 12133 - RNA, 21 nt, synthetic construct
  source 1..21: mol_type = other RNA
ctgcttccagcttctccacat

SEQ ID NO: 12134 - RNA, 21 nt, synthetic construct
  source 1..21: mol_type = other RNA
ctggaagcaggcaagttcgag

SEQ ID NO: 12135 - RNA, 21 nt, synthetic construct
  source 1..21: mol_type = other RNA
ctggacaagtgcatgcaagac

SEQ ID NO: 12136 - RNA, 21 nt, synthetic construct
  source 1..21: mol_type = other RNA
ctggagcactggacaagtgca

SEQ ID NO: 12137 - RNA, 21 nt, synthetic construct
  source 1..21: mol_type = other RNA
ctggatgagtttgtcctcgaa

SEQ ID NO: 12138 - RNA, 21 nt, synthetic construct
  source 1..21: mol_type = other RNA
cttatgcacccaatccttgca

SEQ ID NO: 12139 - RNA, 21 nt, synthetic construct
  source 1..21: mol_type = other RNA
cttcagtgtcttcattgatgt

SEQ ID NO: 12140 - RNA, 21 nt, synthetic construct
  source 1..21: mol_type = other RNA
cttcattgatgtggagaagct

SEQ ID NO: 12141 - RNA, 21 nt, synthetic construct
  source 1..21: mol_type = other RNA
cttccagcttctccacatcaa

SEQ ID NO: 12142 - RNA, 21 nt, synthetic construct
  source 1..21: mol_type = other RNA
cttctccacatcaatgaagac

SEQ ID NO: 12143 - RNA, 21 nt, synthetic construct
  source 1..21: mol_type = other RNA
cttgcagtcatggtcttgcat

SEQ ID NO: 12144 - RNA, 21 nt, synthetic construct
  source 1..21: mol_type = other RNA
cttgcatgcacttgtccagtg

SEQ ID NO: 12145 - RNA, 21 nt, synthetic construct
  source 1..21: mol_type = other RNA
cttgcctgcttccagcttctc

SEQ ID NO: 12146 - RNA, 21 nt, synthetic construct
  source 1..21: mol_type = other RNA
cttgtccagtgctccaggtga

SEQ ID NO: 12147 - RNA, 21 nt, synthetic construct
  source 1..21: mol_type = other RNA
ctttgtgttggtgctatcacc

SEQ ID NO: 12148 - RNA, 21 nt, synthetic construct
  source 1..21: mol_type = other RNA
gaacttgcctgcttccagctt

SEQ ID NO: 12149 - RNA, 21 nt, synthetic construct
  source 1..21: mol_type = other RNA
gaagacactgaagccatgcag

SEQ ID NO: 12150 - RNA, 21 nt, synthetic construct
  source 1..21: mol_type = other RNA
gaagcaggcaagttcgaggac

SEQ ID NO: 12151 - RNA, 21 nt, synthetic construct
  source 1..21: mol_type = other RNA
gaagcataggcaggcacctac

SEQ ID NO: 12152 - RNA, 21 nt, synthetic construct
  source 1..21: mol_type = other RNA
gaagccatgcagctgcaggtg

SEQ ID NO: 12153 - RNA, 21 nt, synthetic construct
  source 1..21: mol_type = other RNA
gaagctggaagcaggcaagtt

SEQ ID NO: 12154 - RNA, 21 nt, synthetic construct
  source 1..21: mol_type = other RNA
gaaggtgcacctgcagctgca

SEQ ID NO: 12155 - RNA, 21 nt, synthetic construct
  source 1..21: mol_type = other RNA
gacaaactcatccagagtgtc

SEQ ID NO: 12156 - RNA, 21 nt, synthetic construct
  source 1..21: mol_type = other RNA
gacaagtgcatgcaagaccat

SEQ ID NO: 12157 - RNA, 21 nt, synthetic construct
  source 1..21: mol_type = other RNA
gacactctggatgagtttgtc

SEQ ID NO: 12158 - RNA, 21 nt, synthetic construct
  source 1..21: mol_type = other RNA
gacactgaagccatgcagctg

SEQ ID NO: 12159 - RNA, 21 nt, synthetic construct
  source 1..21: mol_type = other RNA
gaccatgactgcaaggattgg

SEQ ID NO: 12160 - RNA, 21 nt, synthetic construct
  source 1..21: mol_type = other RNA
gaccgcagaagcataggcagg

SEQ ID NO: 12161 - RNA, 21 nt, synthetic construct
  source 1..21: mol_type = other RNA
gactgcaaggattgggtgcat

SEQ ID NO: 12162 - RNA, 21 nt, synthetic construct
  source 1..21: mol_type = other RNA
gagaagctggaagcaggcaag

SEQ ID NO: 12163 - RNA, 21 nt, synthetic construct
  source 1..21: mol_type = other RNA
gagcactggacaagtgcatgc

SEQ ID NO: 12164 - RNA, 21 nt, synthetic construct
  source 1..21: mol_type = other RNA
gaggacaaactcatccagagt

SEQ ID NO: 12165 - RNA, 21 nt, synthetic construct
  source 1..21: mol_type = other RNA
gagtgtcatgggtgcccgcaa

SEQ ID NO: 12166 - RNA, 21 nt, synthetic construct
  source 1..21: mol_type = other RNA
gagtttgtcctcgaacttgcc

SEQ ID NO: 12167 - RNA, 21 nt, synthetic construct
  source 1..21: mol_type = other RNA
gatagcaccaacacaaagttg

SEQ ID NO: 12168 - RNA, 21 nt, synthetic construct
  source 1..21: mol_type = other RNA
gatgagtttgtcctcgaactt

SEQ ID NO: 12169 - RNA, 21 nt, synthetic construct
  source 1..21: mol_type = other RNA
gatgtggagaagctggaagca

SEQ ID NO: 12170 - RNA, 21 nt, synthetic construct
  source 1..21: mol_type = other RNA
gattgggtgcataaggtaggt

SEQ ID NO: 12171 - RNA, 21 nt, synthetic construct
  source 1..21: mol_type = other RNA
gcaactttgtgttggtgctat

SEQ ID NO: 12172 - RNA, 21 nt, synthetic construct
  source 1..21: mol_type = other RNA
gcaagaccatgactgcaagga

SEQ ID NO: 12173 - RNA, 21 nt, synthetic construct
  source 1..21: mol_type = other RNA
gcaaggattgggtgcataagg

SEQ ID NO: 12174 - RNA, 21 nt, synthetic construct
  source 1..21: mol_type = other RNA
gcaagttcgaggacaaactca

SEQ ID NO: 12175 - RNA, 21 nt, synthetic construct
  source 1..21: mol_type = other RNA
gcaccaacacaaagttgcggg

SEQ ID NO: 12176 - RNA, 21 nt, synthetic construct
  source 1..21: mol_type = other RNA
gcacccaatccttgcagtcat

SEQ ID NO: 12177 - RNA, 21 nt, synthetic construct
  source 1..21: mol_type = other RNA
gcacccatgacactctggatg

SEQ ID NO: 12178 - RNA, 21 nt, synthetic construct
  source 1..21: mol_type = other RNA
gcacctaccttatgcacccaa

SEQ ID NO: 12179 - RNA, 21 nt, synthetic construct
  source 1..21: mol_type = other RNA
gcacctgcagctgcatggctt

SEQ ID NO: 12180 - RNA, 21 nt, synthetic construct
  source 1..21: mol_type = other RNA
gcactggacaagtgcatgcaa

SEQ ID NO: 12181 - RNA, 21 nt, synthetic construct
  source 1..21: mol_type = other RNA
gcacttgtccagtgctccagg

SEQ ID NO: 12182 - RNA, 21 nt, synthetic construct
  source 1..21: mol_type = other RNA
gcagaagcataggcaggcacc

SEQ ID NO: 12183 - RNA, 21 nt, synthetic construct
  source 1..21: mol_type = other RNA
gcagctgcatggcttcagtgt

SEQ ID NO: 12184 - RNA, 21 nt, synthetic construct
  source 1..21: mol_type = other RNA
gcaggcaagttcgaggacaaa

SEQ ID NO: 12185 - RNA, 21 nt, synthetic construct
  source 1..21: mol_type = other RNA
gcaggcacctaccttatgcac

SEQ ID NO: 12186 - RNA, 21 nt, synthetic construct
  source 1..21: mol_type = other RNA
gcagtcatggtcttgcatgca

SEQ ID NO: 12187 - RNA, 21 nt, synthetic construct
  source 1..21: mol_type = other RNA
gcataaggtaggtgcctgcct

SEQ ID NO: 12188 - RNA, 21 nt, synthetic construct
  source 1..21: mol_type = other RNA
gcataggcaggcacctacctt

SEQ ID NO: 12189 - RNA, 21 nt, synthetic construct
  source 1..21: mol_type = other RNA
gcatgcaagaccatgactgca

SEQ ID NO: 12190 - RNA, 21 nt, synthetic construct
  source 1..21: mol_type = other RNA
gcatgcacttgtccagtgctc

SEQ ID NO: 12191 - RNA, 21 nt, synthetic construct
  source 1..21: mol_type = other RNA
gcatggcttcagtgtcttcat

SEQ ID NO: 12192 - RNA, 21 nt, synthetic construct
  source 1..21: mol_type = other RNA
gccatgcagctgcaggtgcac

SEQ ID NO: 12193 - RNA, 21 nt, synthetic construct
  source 1..21: mol_type = other RNA
gcccgcaactttgtgttggtg

SEQ ID NO: 12194 - RNA, 21 nt, synthetic construct
  source 1..21: mol_type = other RNA
gcctgcttccagcttctccac

SEQ ID NO: 12195 - RNA, 21 nt, synthetic construct
  source 1..21: mol_type = other RNA
gcgggcacccatgacactctg

SEQ ID NO: 12196 - RNA, 21 nt, synthetic construct
  source 1..21: mol_type = other RNA
gctatcacctggagcactgga

SEQ ID NO: 12197 - RNA, 21 nt, synthetic construct
  source 1..21: mol_type = other RNA
gctccaggtgatagcaccaac

SEQ ID NO: 12198 - RNA, 21 nt, synthetic construct
  source 1..21: mol_type = other RNA
gctgcatggcttcagtgtctt

SEQ ID NO: 12199 - RNA, 21 nt, synthetic construct
  source 1..21: mol_type = other RNA
gctggaagcaggcaagttcga

SEQ ID NO: 12200 - RNA, 21 nt, synthetic construct
  source 1..21: mol_type = other RNA
gcttcagtgtcttcattgatg

SEQ ID NO: 12201 - RNA, 21 nt, synthetic construct
  source 1..21: mol_type = other RNA
gcttccagcttctccacatca

SEQ ID NO: 12202 - RNA, 21 nt, synthetic construct
  source 1..21: mol_type = other RNA
gcttctccacatcaatgaaga

SEQ ID NO: 12203 - RNA, 21 nt, synthetic construct
  source 1..21: mol_type = other RNA
ggaagcaggcaagttcgagga

SEQ ID NO: 12204 - RNA, 21 nt, synthetic construct
  source 1..21: mol_type = other RNA
ggacaaactcatccagagtgt

SEQ ID NO: 12205 - RNA, 21 nt, synthetic construct
  source 1..21: mol_type = other RNA
ggacaagtgcatgcaagacca

SEQ ID NO: 12206 - RNA, 21 nt, synthetic construct
  source 1..21: mol_type = other RNA
ggaccgcagaagcataggcag

SEQ ID NO: 12207 - RNA, 21 nt, synthetic construct
  source 1..21: mol_type = other RNA
ggagaagctggaagcaggcaa

SEQ ID NO: 12208 - RNA, 21 nt, synthetic construct
  source 1..21: mol_type = other RNA
ggagcactggacaagtgcatg

SEQ ID NO: 12209 - RNA, 21 nt, synthetic construct
  source 1..21: mol_type = other RNA
ggatgagtttgtcctcgaact

SEQ ID NO: 12210 - RNA, 21 nt, synthetic construct
  source 1..21: mol_type = other RNA
ggattgggtgcataaggtagg

SEQ ID NO: 12211 - RNA, 21 nt, synthetic construct
  source 1..21: mol_type = other RNA
ggcaagttcgaggacaaactc

SEQ ID NO: 12212 - RNA, 21 nt, synthetic construct
  source 1..21: mol_type = other RNA
ggcacccatgacactctggat

SEQ ID NO: 12213 - RNA, 21 nt, synthetic construct
  source 1..21: mol_type = other RNA
ggcacctaccttatgcaccca

SEQ ID NO: 12214 - RNA, 21 nt, synthetic construct
  source 1..21: mol_type = other RNA
ggcaggcacctaccttatgca

SEQ ID NO: 12215 - RNA, 21 nt, synthetic construct
  source 1..21: mol_type = other RNA
ggcttcagtgtcttcattgat

SEQ ID NO: 12216 - RNA, 21 nt, synthetic construct
  source 1..21: mol_type = other RNA
gggcacccatgacactctgga

SEQ ID NO: 12217 - RNA, 21 nt, synthetic construct
  source 1..21: mol_type = other RNA
gggtgcataaggtaggtgcct

SEQ ID NO: 12218 - RNA, 21 nt, synthetic construct
  source 1..21: mol_type = other RNA
gggtgcccgcaactttgtgtt

SEQ ID NO: 12219 - RNA, 21 nt, synthetic construct
  source 1..21: mol_type = other RNA
ggtaggtgcctgcctatgctt

SEQ ID NO: 12220 - RNA, 21 nt, synthetic construct
  source 1..21: mol_type = other RNA
ggtcttgcatgcacttgtcca

SEQ ID NO: 12221 - RNA, 21 nt, synthetic construct
  source 1..21: mol_type = other RNA
ggtgatagcaccaacacaaag

SEQ ID NO: 12222 - RNA, 21 nt, synthetic construct
  source 1..21: mol_type = other RNA
ggtgcacctgcagctgcatgg

SEQ ID NO: 12223 - RNA, 21 nt, synthetic construct
  source 1..21: mol_type = other RNA
ggtgcataaggtaggtgcctg

SEQ ID NO: 12224 - RNA, 21 nt, synthetic construct
  source 1..21: mol_type = other RNA
ggtgcccgcaactttgtgttg

SEQ ID NO: 12225 - RNA, 21 nt, synthetic construct
  source 1..21: mol_type = other RNA
ggtgctatcacctggagcact

SEQ ID NO: 12226 - RNA, 21 nt, synthetic construct
  source 1..21: mol_type = other RNA
gtaggtgcctgcctatgcttc

SEQ ID NO: 12227 - RNA, 21 nt, synthetic construct
  source 1..21: mol_type = other RNA
gtcatgggtgcccgcaacttt

SEQ ID NO: 12228 - RNA, 21 nt, synthetic construct
  source 1..21: mol_type = other RNA
gtcatggtcttgcatgcactt

SEQ ID NO: 12229 - RNA, 21 nt, synthetic construct
  source 1..21: mol_type = other RNA
gtccagtgctccaggtgatag

SEQ ID NO: 12230 - RNA, 21 nt, synthetic construct
  source 1..21: mol_type = other RNA
gtcctcgaacttgcctgcttc

SEQ ID NO: 12231 - RNA, 21 nt, synthetic construct
  source 1..21: mol_type = other RNA
gtcttcattgatgtggagaag

SEQ ID NO: 12232 - RNA, 21 nt, synthetic construct
  source 1..21: mol_type = other RNA
gtcttgcatgcacttgtccag

SEQ ID NO: 12233 - RNA, 21 nt, synthetic construct
  source 1..21: mol_type = other RNA
gtgatagcaccaacacaaagt

SEQ ID NO: 12234 - RNA, 21 nt, synthetic construct
  source 1..21: mol_type = other RNA
gtgcacctgcagctgcatggc

SEQ ID NO: 12235 - RNA, 21 nt, synthetic construct
  source 1..21: mol_type = other RNA
gtgcataaggtaggtgcctgc

SEQ ID NO: 12236 - RNA, 21 nt, synthetic construct
  source 1..21: mol_type = other RNA
gtgcatgcaagaccatgactg

SEQ ID NO: 12237 - RNA, 21 nt, synthetic construct
  source 1..21: mol_type = other RNA
gtgcccgcaactttgtgttgg

SEQ ID NO: 12238 - RNA, 21 nt, synthetic construct
  source 1..21: mol_type = other RNA
gtgctatcacctggagcactg

SEQ ID NO: 12239 - RNA, 21 nt, synthetic construct
  source 1..21: mol_type = other RNA
gtgctccaggtgatagcacca

SEQ ID NO: 12240 - RNA, 21 nt, synthetic construct
  source 1..21: mol_type = other RNA
gtggagaagctggaagcaggc

SEQ ID NO: 12241 - RNA, 21 nt, synthetic construct
  source 1..21: mol_type = other RNA
gtgtcatgggtgcccgcaact

SEQ ID NO: 12242 - RNA, 21 nt, synthetic construct
  source 1..21: mol_type = other RNA
gtgtcttcattgatgtggaga

SEQ ID NO: 12243 - RNA, 21 nt, synthetic construct
  source 1..21: mol_type = other RNA
gtgttggtgctatcacctgga

SEQ ID NO: 12244 - RNA, 21 nt, synthetic construct
  source 1..21: mol_type = other RNA
gttcgaggacaaactcatcca

SEQ ID NO: 12245 - RNA, 21 nt, synthetic construct
  source 1..21: mol_type = other RNA
gttgcgggcacccatgacact

SEQ ID NO: 12246 - RNA, 21 nt, synthetic construct
  source 1..21: mol_type = other RNA
gttggtgctatcacctggagc

SEQ ID NO: 12247 - RNA, 21 nt, synthetic construct
  source 1..21: mol_type = other RNA
gtttgtcctcgaacttgcctg

SEQ ID NO: 12248 - RNA, 21 nt, synthetic construct
  source 1..21: mol_type = other RNA
taaggtaggtgcctgcctatg

SEQ ID NO: 12249 - RNA, 21 nt, synthetic construct
  source 1..21: mol_type = other RNA
taccttatgcacccaatcctt

SEQ ID NO: 12250 - RNA, 21 nt, synthetic construct
  source 1..21: mol_type = other RNA
tagcaccaacacaaagttgcg

SEQ ID NO: 12251 - RNA, 21 nt, synthetic construct
  source 1..21: mol_type = other RNA
taggcaggcacctaccttatg

SEQ ID NO: 12252 - RNA, 21 nt, synthetic construct
  source 1..21: mol_type = other RNA
tatcacctggagcactggaca

SEQ ID NO: 12253 - RNA, 21 nt, synthetic construct
  source 1..21: mol_type = other RNA
tatgcacccaatccttgcagt

SEQ ID NO: 12254 - RNA, 21 nt, synthetic construct
  source 1..21: mol_type = other RNA
tcaatgaagacactgaagcca

SEQ ID NO: 12255 - RNA, 21 nt, synthetic construct
  source 1..21: mol_type = other RNA
tcacctggagcactggacaag

SEQ ID NO: 12256 - RNA, 21 nt, synthetic construct
  source 1..21: mol_type = other RNA
tcagtgtcttcattgatgtgg

SEQ ID NO: 12257 - RNA, 21 nt, synthetic construct
  source 1..21: mol_type = other RNA
tcatccagagtgtcatgggtg

SEQ ID NO: 12258 - RNA, 21 nt, synthetic construct
  source 1..21: mol_type = other RNA
tcatgggtgcccgcaactttg

SEQ ID NO: 12259 - RNA, 21 nt, synthetic construct
  source 1..21: mol_type = other RNA
tcatggtcttgcatgcacttg

SEQ ID NO: 12260 - RNA, 21 nt, synthetic construct
  source 1..21: mol_type = other RNA
tcattgatgtggagaagctgg

SEQ ID NO: 12261 - RNA, 21 nt, synthetic construct
  source 1..21: mol_type = other RNA
tccacatcaatgaagacactg

SEQ ID NO: 12262 - RNA, 21 nt, synthetic construct
  source 1..21: mol_type = other RNA
tccagagtgtcatgggtgccc

SEQ ID NO: 12263 - RNA, 21 nt, synthetic construct
  source 1..21: mol_type = other RNA
tccagcttctccacatcaatg

SEQ ID NO: 12264 - RNA, 21 nt, synthetic construct
  source 1..21: mol_type = other RNA
tccaggtgatagcaccaacac

SEQ ID NO: 12265 - RNA, 21 nt, synthetic construct
  source 1..21: mol_type = other RNA
tccagtgctccaggtgatagc

SEQ ID NO: 12266 - RNA, 21 nt, synthetic construct
  source 1..21: mol_type = other RNA
tcctcgaacttgcctgcttcc

SEQ ID NO: 12267 - RNA, 21 nt, synthetic construct
  source 1..21: mol_type = other RNA
tcctgaaggtgcacctgcagc

SEQ ID NO: 12268 - RNA, 21 nt, synthetic construct
  source 1..21: mol_type = other RNA
tccttgcagtcatggtcttgc

SEQ ID NO: 12269 - RNA, 21 nt, synthetic construct
  source 1..21: mol_type = other RNA
tcgaacttgcctgcttccagc

SEQ ID NO: 12270 - RNA, 21 nt, synthetic construct
  source 1..21: mol_type = other RNA
tcgaggacaaactcatccaga

SEQ ID NO: 12271 - RNA, 21 nt, synthetic construct
  source 1..21: mol_type = other RNA
tctccacatcaatgaagacac

SEQ ID NO: 12272 - RNA, 21 nt, synthetic construct
  source 1..21: mol_type = other RNA
tctcctgaaggtgcacctgca

SEQ ID NO: 12273 - RNA, 21 nt, synthetic construct
  source 1..21: mol_type = other RNA
tctggatgagtttgtcctcga

SEQ ID NO: 12274 - RNA, 21 nt, synthetic construct
  source 1..21: mol_type = other RNA
tcttcattgatgtggagaagc

SEQ ID NO: 12275 - RNA, 21 nt, synthetic construct
  source 1..21: mol_type = other RNA
tcttgcatgcacttgtccagt

SEQ ID NO: 12276 - RNA, 21 nt, synthetic construct
  source 1..21: mol_type = other RNA
tgaagacactgaagccatgca

SEQ ID NO: 12277 - RNA, 21 nt, synthetic construct
  source 1..21: mol_type = other RNA
tgaagccatgcagctgcaggt

SEQ ID NO: 12278 - RNA, 21 nt, synthetic construct
  source 1..21: mol_type = other RNA
tgaaggtgcacctgcagctgc

SEQ ID NO: 12279 - RNA, 21 nt, synthetic construct
  source 1..21: mol_type = other RNA
tgacactctggatgagtttgt

SEQ ID NO: 12280 - RNA, 21 nt, synthetic construct
  source 1..21: mol_type = other RNA
tgactgcaaggattgggtgca

SEQ ID NO: 12281 - RNA, 21 nt, synthetic construct
  source 1..21: mol_type = other RNA
tgagtttgtcctcgaacttgc

SEQ ID NO: 12282 - RNA, 21 nt, synthetic construct
  source 1..21: mol_type = other RNA
tgatagcaccaacacaaagtt

SEQ ID NO: 12283 - RNA, 21 nt, synthetic construct
  source 1..21: mol_type = other RNA
tgatgtggagaagctggaagc

SEQ ID NO: 12284 - RNA, 21 nt, synthetic construct
  source 1..21: mol_type = other RNA
tgcaagaccatgactgcaagg

SEQ ID NO: 12285 - RNA, 21 nt, synthetic construct
  source 1..21: mol_type = other RNA
tgcaaggattgggtgcataag

SEQ ID NO: 12286 - RNA, 21 nt, synthetic construct
  source 1..21: mol_type = other RNA
tgcacccaatccttgcagtca

SEQ ID NO: 12287 - RNA, 21 nt, synthetic construct
  source 1..21: mol_type = other RNA
tgcacctgcagctgcatggct

SEQ ID NO: 12288 - RNA, 21 nt, synthetic construct
  source 1..21: mol_type = other RNA
tgcacttgtccagtgctccag

SEQ ID NO: 12289 - RNA, 21 nt, synthetic construct
  source 1..21: mol_type = other RNA
tgcagctgcatggcttcagtg

SEQ ID NO: 12290 - RNA, 21 nt, synthetic construct
  source 1..21: mol_type = other RNA
tgcagtcatggtcttgcatgc

SEQ ID NO: 12291 - RNA, 21 nt, synthetic construct
  source 1..21: mol_type = other RNA
tgcataaggtaggtgcctgcc

SEQ ID NO: 12292 - RNA, 21 nt, synthetic construct
  source 1..21: mol_type = other RNA
tgcatgcaagaccatgactgc

SEQ ID NO: 12293 - RNA, 21 nt, synthetic construct
  source 1..21: mol_type = other RNA
tgcatgcacttgtccagtgct

SEQ ID NO: 12294 - RNA, 21 nt, synthetic construct
  source 1..21: mol_type = other RNA
tgcatggcttcagtgtcttca

SEQ ID NO: 12295 - RNA, 21 nt, synthetic construct
  source 1..21: mol_type = other RNA
tgcccgcaactttgtgttggt

SEQ ID NO: 12296 - RNA, 21 nt, synthetic construct
  source 1..21: mol_type = other RNA
tgcctgcttccagcttctcca

SEQ ID NO: 12297 - RNA, 21 nt, synthetic construct
  source 1..21: mol_type = other RNA
tgcgggcacccatgacactct

SEQ ID NO: 12298 - RNA, 21 nt, synthetic construct
  source 1..21: mol_type = other RNA
tgctatcacctggagcactgg

SEQ ID NO: 12299 - RNA, 21 nt, synthetic construct
  source 1..21: mol_type = other RNA
tgctccaggtgatagcaccaa

SEQ ID NO: 12300 - RNA, 21 nt, synthetic construct
  source 1..21: mol_type = other RNA
tgcttccagcttctccacatc

SEQ ID NO: 12301 - RNA, 21 nt, synthetic construct
  source 1..21: mol_type = other RNA
tggaagcaggcaagttcgagg

SEQ ID NO: 12302 - RNA, 21 nt, synthetic construct
  source 1..21: mol_type = other RNA
tggacaagtgcatgcaagacc

SEQ ID NO: 12303 - RNA, 21 nt, synthetic construct
  source 1..21: mol_type = other RNA
tggagaagctggaagcaggca

SEQ ID NO: 12304 - RNA, 21 nt, synthetic construct
  source 1..21: mol_type = other RNA
tggagcactggacaagtgcat

SEQ ID NO: 12305 - RNA, 21 nt, synthetic construct
  source 1..21: mol_type = other RNA
tggatgagtttgtcctcgaac

SEQ ID NO: 12306 - RNA, 21 nt, synthetic construct
  source 1..21: mol_type = other RNA
tggcttcagtgtcttcattga

SEQ ID NO: 12307 - RNA, 21 nt, synthetic construct
  source 1..21: mol_type = other RNA
tgggtgcataaggtaggtgcc

SEQ ID NO: 12308 - RNA, 21 nt, synthetic construct
  source 1..21: mol_type = other RNA
tgggtgcccgcaactttgtgt

SEQ ID NO: 12309 - RNA, 21 nt, synthetic construct
  source 1..21: mol_type = other RNA
tggtcttgcatgcacttgtcc

SEQ ID NO: 12310 - RNA, 21 nt, synthetic construct
  source 1..21: mol_type = other RNA
tggtgctatcacctggagcac

SEQ ID NO: 12311 - RNA, 21 nt, synthetic construct
  source 1..21: mol_type = other RNA
tgtcatgggtgcccgcaactt

SEQ ID NO: 12312 - RNA, 21 nt, synthetic construct
  source 1..21: mol_type = other RNA
tgtccagtgctccaggtgata

SEQ ID NO: 12313 - RNA, 21 nt, synthetic construct
  source 1..21: mol_type = other RNA
tgtcctcgaacttgcctgctt

SEQ ID NO: 12314 - RNA, 21 nt, synthetic construct
  source 1..21: mol_type = other RNA
tgtcttcattgatgtggagaa

SEQ ID NO: 12315 - RNA, 21 nt, synthetic construct
  source 1..21: mol_type = other RNA
tgtggagaagctggaagcagg

SEQ ID NO: 12316 - RNA, 21 nt, synthetic construct
  source 1..21: mol_type = other RNA
tgtgttggtgctatcacctgg

SEQ ID NO: 12317 - RNA, 21 nt, synthetic construct
  source 1..21: mol_type = other RNA
tgttggtgctatcacctggag

SEQ ID NO: 12318 - RNA, 21 nt, synthetic construct
  source 1..21: mol_type = other RNA
ttatgcacccaatccttgcag

SEQ ID NO: 12319 - RNA, 21 nt, synthetic construct
  source 1..21: mol_type = other RNA
ttcagtgtcttcattgatgtg

SEQ ID NO: 12320 - RNA, 21 nt, synthetic construct
  source 1..21: mol_type = other RNA
ttcattgatgtggagaagctg

SEQ ID NO: 12321 - RNA, 21 nt, synthetic construct
  source 1..21: mol_type = other RNA
ttccagcttctccacatcaat

SEQ ID NO: 12322 - RNA, 21 nt, synthetic construct
  source 1..21: mol_type = other RNA
ttcgaggacaaactcatccag

SEQ ID NO: 12323 - RNA, 21 nt, synthetic construct
  source 1..21: mol_type = other RNA
ttctccacatcaatgaagaca

SEQ ID NO: 12324 - RNA, 21 nt, synthetic construct
  source 1..21: mol_type = other RNA
ttgatgtggagaagctggaag

SEQ ID NO: 12325 - RNA, 21 nt, synthetic construct
  source 1..21: mol_type = other RNA
ttgcagtcatggtcttgcatg

SEQ ID NO: 12326 - RNA, 21 nt, synthetic construct
  source 1..21: mol_type = other RNA
ttgcatgcacttgtccagtgc

SEQ ID NO: 12327 - RNA, 21 nt, synthetic construct
  source 1..21: mol_type = other RNA
ttgcctgcttccagcttctcc

SEQ ID NO: 12328 - RNA, 21 nt, synthetic construct
  source 1..21: mol_type = other RNA
ttgcgggcacccatgacactc

SEQ ID NO: 12329 - RNA, 21 nt, synthetic construct
  source 1..21: mol_type = other RNA
ttgggtgcataaggtaggtgc

SEQ ID NO: 12330 - RNA, 21 nt, synthetic construct
  source 1..21: mol_type = other RNA
ttggtgctatcacctggagca

SEQ ID NO: 12331 - RNA, 21 nt, synthetic construct
  source 1..21: mol_type = other RNA
ttgtccagtgctccaggtgat

SEQ ID NO: 12332 - RNA, 21 nt, synthetic construct
  source 1..21: mol_type = other RNA
ttgtcctcgaacttgcctgct

SEQ ID NO: 12333 - RNA, 21 nt, synthetic construct
  source 1..21: mol_type = other RNA
ttgtgttggtgctatcacctg

SEQ ID NO: 12334 - RNA, 21 nt, synthetic construct
  source 1..21: mol_type = other RNA
tttgtcctcgaacttgcctgc

SEQ ID NO: 12335 - RNA, 21 nt, synthetic construct
  source 1..21: mol_type = other RNA
tttgtgttggtgctatcacct

SEQ ID NO: 12336 - RNA, 22 nt, synthetic construct
  source 1..22: mol_type = other RNA
aaactcatccagagtgtcatgg

SEQ ID NO: 12337 - RNA, 22 nt, synthetic construct
  source 1..22: mol_type = other RNA
aaagttgcgggcacccatgaca

SEQ ID NO: 12338 - RNA, 22 nt, synthetic construct
  source 1..22: mol_type = other RNA
aacacaaagttgcgggcaccca

SEQ ID NO: 12339 - RNA, 22 nt, synthetic construct
  source 1..22: mol_type = other RNA
aactcatccagagtgtcatggg

SEQ ID NO: 12340 - RNA, 22 nt, synthetic construct
  source 1..22: mol_type = other RNA
aacttgcctgcttccagcttct

SEQ ID NO: 12341 - RNA, 22 nt, synthetic construct
  source 1..22: mol_type = other RNA
aactttgtgttggtgctatcac

SEQ ID NO: 12342 - RNA, 22 nt, synthetic construct
  source 1..22: mol_type = other RNA
aagacactgaagccatgcagct

SEQ ID NO: 12343 - RNA, 22 nt, synthetic construct
  source 1..22: mol_type = other RNA
aagaccatgactgcaaggattg

SEQ ID NO: 12344 - RNA, 22 nt, synthetic construct
  source 1..22: mol_type = other RNA
aagcaggcaagttcgaggacaa

SEQ ID NO: 12345 - RNA, 22 nt, synthetic construct
  source 1..22: mol_type = other RNA
aagcataggcaggcacctacct

SEQ ID NO: 12346 - RNA, 22 nt, synthetic construct
  source 1..22: mol_type = other RNA
aagccatgcagctgcaggtgca

SEQ ID NO: 12347 - RNA, 22 nt, synthetic construct
  source 1..22: mol_type = other RNA
aagctggaagcaggcaagttcg

SEQ ID NO: 12348 - RNA, 22 nt, synthetic construct
  source 1..22: mol_type = other RNA
aaggattgggtgcataaggtag

SEQ ID NO: 12349 - RNA, 22 nt, synthetic construct
  source 1..22: mol_type = other RNA
aaggtaggtgcctgcctatgct

SEQ ID NO: 12350 - RNA, 22 nt, synthetic construct
  source 1..22: mol_type = other RNA
aaggtgcacctgcagctgcatg

SEQ ID NO: 12351 - RNA, 22 nt, synthetic construct
  source 1..22: mol_type = other RNA
aagtgcatgcaagaccatgact

SEQ ID NO: 12352 - RNA, 22 nt, synthetic construct
  source 1..22: mol_type = other RNA
aagttcgaggacaaactcatcc

SEQ ID NO: 12353 - RNA, 22 nt, synthetic construct
  source 1..22: mol_type = other RNA
aagttgcgggcacccatgacac

SEQ ID NO: 12354 - RNA, 22 nt, synthetic construct
  source 1..22: mol_type = other RNA
aatccttgcagtcatggtcttg

SEQ ID NO: 12355 - RNA, 22 nt, synthetic construct
  source 1..22: mol_type = other RNA
aatgaagacactgaagccatgc

SEQ ID NO: 12356 - RNA, 22 nt, synthetic construct
  source 1..22: mol_type = other RNA
acaaactcatccagagtgtcat

SEQ ID NO: 12357 - RNA, 22 nt, synthetic construct
  source 1..22: mol_type = other RNA
acaaagttgcgggcacccatga

SEQ ID NO: 12358 - RNA, 22 nt, synthetic construct
  source 1..22: mol_type = other RNA
acaagtgcatgcaagaccatga

SEQ ID NO: 12359 - RNA, 22 nt, synthetic construct
  source 1..22: mol_type = other RNA
acacaaagttgcgggcacccat

SEQ ID NO: 12360 - RNA, 22 nt, synthetic construct
  source 1..22: mol_type = other RNA
acactctggatgagtttgtcct

SEQ ID NO: 12361 - RNA, 22 nt, synthetic construct
  source 1..22: mol_type = other RNA
acactgaagccatgcagctgca

SEQ ID NO: 12362 - RNA, 22 nt, synthetic construct
  source 1..22: mol_type = other RNA
acatcaatgaagacactgaagc

SEQ ID NO: 12363 - RNA, 22 nt, synthetic construct
  source 1..22: mol_type = other RNA
accaacacaaagttgcgggcac

SEQ ID NO: 12364 - RNA, 22 nt, synthetic construct
  source 1..22: mol_type = other RNA
accatgactgcaaggattgggt

SEQ ID NO: 12365 - RNA, 22 nt, synthetic construct
  source 1..22: mol_type = other RNA
acccaatccttgcagtcatggt

SEQ ID NO: 12366 - RNA, 22 nt, synthetic construct
  source 1..22: mol_type = other RNA
acccatgacactctggatgagt

SEQ ID NO: 12367 - RNA, 22 nt, synthetic construct
  source 1..22: mol_type = other RNA
accgcagaagcataggcaggca

SEQ ID NO: 12368 - RNA, 22 nt, synthetic construct
  source 1..22: mol_type = other RNA
acctaccttatgcacccaatcc

SEQ ID NO: 12369 - RNA, 22 nt, synthetic construct
  source 1..22: mol_type = other RNA
acctgcagctgcatggcttcag

SEQ ID NO: 12370 - RNA, 22 nt, synthetic construct
  source 1..22: mol_type = other RNA
acctggagcactggacaagtgc

SEQ ID NO: 12371 - RNA, 22 nt, synthetic construct
  source 1..22: mol_type = other RNA
accttatgcacccaatccttgc

SEQ ID NO: 12372 - RNA, 22 nt, synthetic construct
  source 1..22: mol_type = other RNA
actcatccagagtgtcatgggt

SEQ ID NO: 12373 - RNA, 22 nt, synthetic construct
  source 1..22: mol_type = other RNA
actctggatgagtttgtcctcg

SEQ ID NO: 12374 - RNA, 22 nt, synthetic construct
  source 1..22: mol_type = other RNA
actgaagccatgcagctgcagg

SEQ ID NO: 12375 - RNA, 22 nt, synthetic construct
  source 1..22: mol_type = other RNA
actgcaaggattgggtgcataa

SEQ ID NO: 12376 - RNA, 22 nt, synthetic construct
  source 1..22: mol_type = other RNA
actggacaagtgcatgcaagac

SEQ ID NO: 12377 - RNA, 22 nt, synthetic construct
  source 1..22: mol_type = other RNA
acttgcctgcttccagcttctc

SEQ ID NO: 12378 - RNA, 22 nt, synthetic construct
  source 1..22: mol_type = other RNA
acttgtccagtgctccaggtga

SEQ ID NO: 12379 - RNA, 22 nt, synthetic construct
  source 1..22: mol_type = other RNA
actttgtgttggtgctatcacc

SEQ ID NO: 12380 - RNA, 22 nt, synthetic construct
  source 1..22: mol_type = other RNA
agaagcataggcaggcacctac

SEQ ID NO: 12381 - RNA, 22 nt, synthetic construct
  source 1..22: mol_type = other RNA
agaagctggaagcaggcaagtt

SEQ ID NO: 12382 - RNA, 22 nt, synthetic construct
  source 1..22: mol_type = other RNA
agacactgaagccatgcagctg

SEQ ID NO: 12383 - RNA, 22 nt, synthetic construct
  source 1..22: mol_type = other RNA
agaccatgactgcaaggattgg

SEQ ID NO: 12384 - RNA, 22 nt, synthetic construct
  source 1..22: mol_type = other RNA
agagtgtcatgggtgcccgcaa

SEQ ID NO: 12385 - RNA, 22 nt, synthetic construct
  source 1..22: mol_type = other RNA
agcaccaacacaaagttgcggg

SEQ ID NO: 12386 - RNA, 22 nt, synthetic construct
  source 1..22: mol_type = other RNA
agcactggacaagtgcatgcaa

SEQ ID NO: 12387 - RNA, 22 nt, synthetic construct
  source 1..22: mol_type = other RNA
agcaggcaagttcgaggacaaa

SEQ ID NO: 12388 - RNA, 22 nt, synthetic construct
  source 1..22: mol_type = other RNA
agcataggcaggcacctacctt

SEQ ID NO: 12389 - RNA, 22 nt, synthetic construct
  source 1..22: mol_type = other RNA
agccatgcagctgcaggtgcac

SEQ ID NO: 12390 - RNA, 22 nt, synthetic construct
  source 1..22: mol_type = other RNA
agctgcatggcttcagtgtctt

SEQ ID NO: 12391 - RNA, 22 nt, synthetic construct
  source 1..22: mol_type = other RNA
agctggaagcaggcaagttcga

SEQ ID NO: 12392 - RNA, 22 nt, synthetic construct
  source 1..22: mol_type = other RNA
agcttctccacatcaatgaaga

SEQ ID NO: 12393 - RNA, 22 nt, synthetic construct
  source 1..22: mol_type = other RNA
aggacaaactcatccagagtgt

SEQ ID NO: 12394 - RNA, 22 nt, synthetic construct
  source 1..22: mol_type = other RNA
aggattgggtgcataaggtagg

SEQ ID NO: 12395 - RNA, 22 nt, synthetic construct
  source 1..22: mol_type = other RNA
aggcaagttcgaggacaaactc

SEQ ID NO: 12396 - RNA, 22 nt, synthetic construct
  source 1..22: mol_type = other RNA
aggcacctaccttatgcaccca

SEQ ID NO: 12397 - RNA, 22 nt, synthetic construct
  source 1..22: mol_type = other RNA
aggcaggcacctaccttatgca

SEQ ID NO: 12398 - RNA, 22 nt, synthetic construct
  source 1..22: mol_type = other RNA
aggtaggtgcctgcctatgctt

SEQ ID NO: 12399 - RNA, 22 nt, synthetic construct
  source 1..22: mol_type = other RNA
aggtgatagcaccaacacaaag

SEQ ID NO: 12400 - RNA, 22 nt, synthetic construct
  source 1..22: mol_type = other RNA
aggtgcacctgcagctgcatgg

SEQ ID NO: 12401 - RNA, 22 nt, synthetic construct
  source 1..22: mol_type = other RNA
agtcatggtcttgcatgcactt

SEQ ID NO: 12402 - RNA, 22 nt, synthetic construct
  source 1..22: mol_type = other RNA
agtgcatgcaagaccatgactg

SEQ ID NO: 12403 - RNA, 22 nt, synthetic construct
  source 1..22: mol_type = other RNA
agtgctccaggtgatagcacca

SEQ ID NO: 12404 - RNA, 22 nt, synthetic construct
  source 1..22: mol_type = other RNA
agtgtcatgggtgcccgcaact

SEQ ID NO: 12405 - RNA, 22 nt, synthetic construct
  source 1..22: mol_type = other RNA
agtgtcttcattgatgtggaga

SEQ ID NO: 12406 - RNA, 22 nt, synthetic construct
  source 1..22: mol_type = other RNA
agttcgaggacaaactcatcca

SEQ ID NO: 12407 - RNA, 22 nt, synthetic construct
  source 1..22: mol_type = other RNA
agttgcgggcacccatgacact

SEQ ID NO: 12408 - RNA, 22 nt, synthetic construct
  source 1..22: mol_type = other RNA
agtttgtcctcgaacttgcctg

SEQ ID NO: 12409 - RNA, 22 nt, synthetic construct
  source 1..22: mol_type = other RNA
ataaggtaggtgcctgcctatg

SEQ ID NO: 12410 - RNA, 22 nt, synthetic construct
  source 1..22: mol_type = other RNA
atagcaccaacacaaagttgcg

SEQ ID NO: 12411 - RNA, 22 nt, synthetic construct
  source 1..22: mol_type = other RNA
ataggcaggcacctaccttatg

SEQ ID NO: 12412 - RNA, 22 nt, synthetic construct
  source 1..22: mol_type = other RNA
atcaatgaagacactgaagcca

SEQ ID NO: 12413 - RNA, 22 nt, synthetic construct
  source 1..22: mol_type = other RNA
atcacctggagcactggacaag

SEQ ID NO: 12414 - RNA, 22 nt, synthetic construct
  source 1..22: mol_type = other RNA
atccagagtgtcatgggtgccc

SEQ ID NO: 12415 - RNA, 22 nt, synthetic construct
  source 1..22: mol_type = other RNA
atccttgcagtcatggtcttgc

SEQ ID NO: 12416 - RNA, 22 nt, synthetic construct
  source 1..22: mol_type = other RNA
atgaagacactgaagccatgca

SEQ ID NO: 12417 - RNA, 22 nt, synthetic construct
  source 1..22: mol_type = other RNA
atgacactctggatgagtttgt

SEQ ID NO: 12418 - RNA, 22 nt, synthetic construct
  source 1..22: mol_type = other RNA
atgactgcaaggattgggtgca

SEQ ID NO: 12419 - RNA, 22 nt, synthetic construct
  source 1..22: mol_type = other RNA
atgagtttgtcctcgaacttgc

SEQ ID NO: 12420 - RNA, 22 nt, synthetic construct
  source 1..22: mol_type = other RNA
atgcaagaccatgactgcaagg

SEQ ID NO: 12421 - RNA, 22 nt, synthetic construct
  source 1..22: mol_type = other RNA
atgcacccaatccttgcagtca

SEQ ID NO: 12422 - RNA, 22 nt, synthetic construct
  source 1..22: mol_type = other RNA
atgcacttgtccagtgctccag

SEQ ID NO: 12423 - RNA, 22 nt, synthetic construct
  source 1..22: mol_type = other RNA
atggcttcagtgtcttcattga

SEQ ID NO: 12424 - RNA, 22 nt, synthetic construct
  source 1..22: mol_type = other RNA
atgggtgcccgcaactttgtgt

SEQ ID NO: 12425 - RNA, 22 nt, synthetic construct
  source 1..22: mol_type = other RNA
atggtcttgcatgcacttgtcc

SEQ ID NO: 12426 - RNA, 22 nt, synthetic construct
  source 1..22: mol_type = other RNA
atgtggagaagctggaagcagg

SEQ ID NO: 12427 - RNA, 22 nt, synthetic construct
  source 1..22: mol_type = other RNA
attgatgtggagaagctggaag

SEQ ID NO: 12428 - RNA, 22 nt, synthetic construct
  source 1..22: mol_type = other RNA
attgggtgcataaggtaggtgc

SEQ ID NO: 12429 - RNA, 22 nt, synthetic construct
  source 1..22: mol_type = other RNA
caaactcatccagagtgtcatg

SEQ ID NO: 12430 - RNA, 22 nt, synthetic construct
  source 1..22: mol_type = other RNA
caaagttgcgggcacccatgac

SEQ ID NO: 12431 - RNA, 22 nt, synthetic construct
  source 1..22: mol_type = other RNA
caacacaaagttgcgggcaccc

SEQ ID NO: 12432 - RNA, 22 nt, synthetic construct
  source 1..22: mol_type = other RNA
caactttgtgttggtgctatca

SEQ ID NO: 12433 - RNA, 22 nt, synthetic construct
  source 1..22: mol_type = other RNA
caagaccatgactgcaaggatt

SEQ ID NO: 12434 - RNA, 22 nt, synthetic construct
  source 1..22: mol_type = other RNA
caaggattgggtgcataaggta

SEQ ID NO: 12435 - RNA, 22 nt, synthetic construct
  source 1..22: mol_type = other RNA
caagtgcatgcaagaccatgac

SEQ ID NO: 12436 - RNA, 22 nt, synthetic construct
  source 1..22: mol_type = other RNA
caagttcgaggacaaactcatc

SEQ ID NO: 12437 - RNA, 22 nt, synthetic construct
  source 1..22: mol_type = other RNA
caatccttgcagtcatggtctt

SEQ ID NO: 12438 - RNA, 22 nt, synthetic construct
  source 1..22: mol_type = other RNA
caatgaagacactgaagccatg

SEQ ID NO: 12439 - RNA, 22 nt, synthetic construct
  source 1..22: mol_type = other RNA
cacaaagttgcgggcacccatg

SEQ ID NO: 12440 - RNA, 22 nt, synthetic construct
  source 1..22: mol_type = other RNA
cacatcaatgaagacactgaag

SEQ ID NO: 12441 - RNA, 22 nt, synthetic construct
  source 1..22: mol_type = other RNA
caccaacacaaagttgcgggca

SEQ ID NO: 12442 - RNA, 22 nt, synthetic construct
  source 1..22: mol_type = other RNA
cacccaatccttgcagtcatgg

SEQ ID NO: 12443 - RNA, 22 nt, synthetic construct
  source 1..22: mol_type = other RNA
cacccatgacactctggatgag

SEQ ID NO: 12444 - RNA, 22 nt, synthetic construct
  source 1..22: mol_type = other RNA
cacctaccttatgcacccaatc

SEQ ID NO: 12445 - RNA, 22 nt, synthetic construct
  source 1..22: mol_type = other RNA
cacctgcagctgcatggcttca

SEQ ID NO: 12446 - RNA, 22 nt, synthetic construct
  source 1..22: mol_type = other RNA
cacctggagcactggacaagtg

SEQ ID NO: 12447 - RNA, 22 nt, synthetic construct
  source 1..22: mol_type = other RNA
cactctggatgagtttgtcctc

SEQ ID NO: 12448 - RNA, 22 nt, synthetic construct
  source 1..22: mol_type = other RNA
cactgaagccatgcagctgcag

SEQ ID NO: 12449 - RNA, 22 nt, synthetic construct
  source 1..22: mol_type = other RNA
cactggacaagtgcatgcaaga

SEQ ID NO: 12450 - RNA, 22 nt, synthetic construct
  source 1..22: mol_type = other RNA
cacttgtccagtgctccaggtg

SEQ ID NO: 12451 - RNA, 22 nt, synthetic construct
  source 1..22: mol_type = other RNA
cagaagcataggcaggcaccta

SEQ ID NO: 12452 - RNA, 22 nt, synthetic construct
  source 1..22: mol_type = other RNA
cagagtgtcatgggtgcccgca

SEQ ID NO: 12453 - RNA, 22 nt, synthetic construct
  source 1..22: mol_type = other RNA
cagctgcatggcttcagtgtct

SEQ ID NO: 12454 - RNA, 22 nt, synthetic construct
  source 1..22: mol_type = other RNA
cagcttctccacatcaatgaag

SEQ ID NO: 12455 - RNA, 22 nt, synthetic construct
  source 1..22: mol_type = other RNA
caggcaagttcgaggacaaact

SEQ ID NO: 12456 - RNA, 22 nt, synthetic construct
  source 1..22: mol_type = other RNA
caggcacctaccttatgcaccc

SEQ ID NO: 12457 - RNA, 22 nt, synthetic construct
  source 1..22: mol_type = other RNA
caggtgatagcaccaacacaaa

SEQ ID NO: 12458 - RNA, 22 nt, synthetic construct
  source 1..22: mol_type = other RNA
cagtcatggtcttgcatgcact

SEQ ID NO: 12459 - RNA, 22 nt, synthetic construct
  source 1..22: mol_type = other RNA
cagtgctccaggtgatagcacc

SEQ ID NO: 12460 - RNA, 22 nt, synthetic construct
  source 1..22: mol_type = other RNA
cagtgtcttcattgatgtggag

SEQ ID NO: 12461 - RNA, 22 nt, synthetic construct
  source 1..22: mol_type = other RNA
cataaggtaggtgcctgcctat

SEQ ID NO: 12462 - RNA, 22 nt, synthetic construct
  source 1..22: mol_type = other RNA
cataggcaggcacctaccttat

SEQ ID NO: 12463 - RNA, 22 nt, synthetic construct
  source 1..22: mol_type = other RNA
catcaatgaagacactgaagcc

SEQ ID NO: 12464 - RNA, 22 nt, synthetic construct
  source 1..22: mol_type = other RNA
catccagagtgtcatgggtgcc

SEQ ID NO: 12465 - RNA, 22 nt, synthetic construct
  source 1..22: mol_type = other RNA
catgacactctggatgagtttg

SEQ ID NO: 12466 - RNA, 22 nt, synthetic construct
  source 1..22: mol_type = other RNA
catgactgcaaggattgggtgc

SEQ ID NO: 12467 - RNA, 22 nt, synthetic construct
  source 1..22: mol_type = other RNA
catgcaagaccatgactgcaag

SEQ ID NO: 12468 - RNA, 22 nt, synthetic construct
  source 1..22: mol_type = other RNA
catgcacttgtccagtgctcca

SEQ ID NO: 12469 - RNA, 22 nt, synthetic construct
  source 1..22: mol_type = other RNA
catggcttcagtgtcttcattg

SEQ ID NO: 12470 - RNA, 22 nt, synthetic construct
  source 1..22: mol_type = other RNA
catgggtgcccgcaactttgtg

SEQ ID NO: 12471 - RNA, 22 nt, synthetic construct
  source 1..22: mol_type = other RNA
catggtcttgcatgcacttgtc

SEQ ID NO: 12472 - RNA, 22 nt, synthetic construct
  source 1..22: mol_type = other RNA
cattgatgtggagaagctggaa

SEQ ID NO: 12473 - RNA, 22 nt, synthetic construct
  source 1..22: mol_type = other RNA
ccaacacaaagttgcgggcacc

SEQ ID NO: 12474 - RNA, 22 nt, synthetic construct
  source 1..22: mol_type = other RNA
ccaatccttgcagtcatggtct

SEQ ID NO: 12475 - RNA, 22 nt, synthetic construct
  source 1..22: mol_type = other RNA
ccacatcaatgaagacactgaa

SEQ ID NO: 12476 - RNA, 22 nt, synthetic construct
  source 1..22: mol_type = other RNA
ccagagtgtcatgggtgcccgc

SEQ ID NO: 12477 - RNA, 22 nt, synthetic construct
  source 1..22: mol_type = other RNA
ccagcttctccacatcaatgaa

SEQ ID NO: 12478 - RNA, 22 nt, synthetic construct
  source 1..22: mol_type = other RNA
ccaggtgatagcaccaacacaa

SEQ ID NO: 12479 - RNA, 22 nt, synthetic construct
  source 1..22: mol_type = other RNA
ccagtgctccaggtgatagcac

SEQ ID NO: 12480 - RNA, 22 nt, synthetic construct
  source 1..22: mol_type = other RNA
ccatgacactctggatgagttt

SEQ ID NO: 12481 - RNA, 22 nt, synthetic construct
  source 1..22: mol_type = other RNA
ccatgactgcaaggattgggtg

SEQ ID NO: 12482 - RNA, 22 nt, synthetic construct
  source 1..22: mol_type = other RNA
ccatgcagctgcaggtgcacct

SEQ ID NO: 12483 - RNA, 22 nt, synthetic construct
  source 1..22: mol_type = other RNA
cccaatccttgcagtcatggtc

SEQ ID NO: 12484 - RNA, 22 nt, synthetic construct
  source 1..22: mol_type = other RNA
cccatgacactctggatgagtt

SEQ ID NO: 12485 - RNA, 22 nt, synthetic construct
  source 1..22: mol_type = other RNA
cccgcaactttgtgttggtgct

SEQ ID NO: 12486 - RNA, 22 nt, synthetic construct
  source 1..22: mol_type = other RNA
ccgcaactttgtgttggtgcta

SEQ ID NO: 12487 - RNA, 22 nt, synthetic construct
  source 1..22: mol_type = other RNA
ccgcagaagcataggcaggcac

SEQ ID NO: 12488 - RNA, 22 nt, synthetic construct
  source 1..22: mol_type = other RNA
cctaccttatgcacccaatcct

SEQ ID NO: 12489 - RNA, 22 nt, synthetic construct
  source 1..22: mol_type = other RNA
cctcgaacttgcctgcttccag

SEQ ID NO: 12490 - RNA, 22 nt, synthetic construct
  source 1..22: mol_type = other RNA
cctgaaggtgcacctgcagctg

SEQ ID NO: 12491 - RNA, 22 nt, synthetic construct
  source 1..22: mol_type = other RNA
cctgcagctgcatggcttcagt

SEQ ID NO: 12492 - RNA, 22 nt, synthetic construct
  source 1..22: mol_type = other RNA
cctgcttccagcttctccacat

SEQ ID NO: 12493 - RNA, 22 nt, synthetic construct
  source 1..22: mol_type = other RNA
cctggagcactggacaagtgca

SEQ ID NO: 12494 - RNA, 22 nt, synthetic construct
  source 1..22: mol_type = other RNA
ccttatgcacccaatccttgca

SEQ ID NO: 12495 - RNA, 22 nt, synthetic construct
  source 1..22: mol_type = other RNA
ccttgcagtcatggtcttgcat

SEQ ID NO: 12496 - RNA, 22 nt, synthetic construct
  source 1..22: mol_type = other RNA
cgaacttgcctgcttccagctt

SEQ ID NO: 12497 - RNA, 22 nt, synthetic construct
  source 1..22: mol_type = other RNA
cgaggacaaactcatccagagt

SEQ ID NO: 12498 - RNA, 22 nt, synthetic construct
  source 1..22: mol_type = other RNA
cgcaactttgtgttggtgctat

SEQ ID NO: 12499 - RNA, 22 nt, synthetic construct
  source 1..22: mol_type = other RNA
cgcagaagcataggcaggcacc

SEQ ID NO: 12500 - RNA, 22 nt, synthetic construct
  source 1..22: mol_type = other RNA
cgggcacccatgacactctgga

SEQ ID NO: 12501 - RNA, 22 nt, synthetic construct
  source 1..22: mol_type = other RNA
ctaccttatgcacccaatcctt

SEQ ID NO: 12502 - RNA, 22 nt, synthetic construct
  source 1..22: mol_type = other RNA
ctatcacctggagcactggaca

SEQ ID NO: 12503 - RNA, 22 nt, synthetic construct
  source 1..22: mol_type = other RNA
ctcatccagagtgtcatgggtg

SEQ ID NO: 12504 - RNA, 22 nt, synthetic construct
  source 1..22: mol_type = other RNA
ctccacatcaatgaagacactg

SEQ ID NO: 12505 - RNA, 22 nt, synthetic construct
  source 1..22: mol_type = other RNA
ctccaggtgatagcaccaacac

SEQ ID NO: 12506 - RNA, 22 nt, synthetic construct
  source 1..22: mol_type = other RNA
ctcctgaaggtgcacctgcagc

SEQ ID NO: 12507 - RNA, 22 nt, synthetic construct
  source 1..22: mol_type = other RNA
ctcgaacttgcctgcttccagc

SEQ ID NO: 12508 - RNA, 22 nt, synthetic construct
  source 1..22: mol_type = other RNA
ctctggatgagtttgtcctcga

SEQ ID NO: 12509 - RNA, 22 nt, synthetic construct
  source 1..22: mol_type = other RNA
ctgaagccatgcagctgcaggt

SEQ ID NO: 12510 - RNA, 22 nt, synthetic construct
  source 1..22: mol_type = other RNA
ctgaaggtgcacctgcagctgc

SEQ ID NO: 12511 - RNA, 22 nt, synthetic construct
  source 1..22: mol_type = other RNA
ctgcaaggattgggtgcataag

SEQ ID NO: 12512 - RNA, 22 nt, synthetic construct
  source 1..22: mol_type = other RNA
ctgcagctgcatggcttcagtg

SEQ ID NO: 12513 - RNA, 22 nt, synthetic construct
  source 1..22: mol_type = other RNA
ctgcatggcttcagtgtcttca

SEQ ID NO: 12514 - RNA, 22 nt, synthetic construct
  source 1..22: mol_type = other RNA
ctgcttccagcttctccacatc

SEQ ID NO: 12515 - RNA, 22 nt, synthetic construct
  source 1..22: mol_type = other RNA
ctggaagcaggcaagttcgagg

SEQ ID NO: 12516 - RNA, 22 nt, synthetic construct
  source 1..22: mol_type = other RNA
ctggacaagtgcatgcaagacc

SEQ ID NO: 12517 - RNA, 22 nt, synthetic construct
  source 1..22: mol_type = other RNA
ctggagcactggacaagtgcat

SEQ ID NO: 12518 - RNA, 22 nt, synthetic construct
  source 1..22: mol_type = other RNA
ctggatgagtttgtcctcgaac

SEQ ID NO: 12519 - RNA, 22 nt, synthetic construct
  source 1..22: mol_type = other RNA
cttatgcacccaatccttgcag

SEQ ID NO: 12520 - RNA, 22 nt, synthetic construct
  source 1..22: mol_type = other RNA
cttcagtgtcttcattgatgtg

SEQ ID NO: 12521 - RNA, 22 nt, synthetic construct
  source 1..22: mol_type = other RNA
cttcattgatgtggagaagctg

SEQ ID NO: 12522 - RNA, 22 nt, synthetic construct
  source 1..22: mol_type = other RNA
cttccagcttctccacatcaat

SEQ ID NO: 12523 - RNA, 22 nt, synthetic construct
  source 1..22: mol_type = other RNA
cttctccacatcaatgaagaca

SEQ ID NO: 12524 - RNA, 22 nt, synthetic construct
  source 1..22: mol_type = other RNA
cttgcagtcatggtcttgcatg

SEQ ID NO: 12525 - RNA, 22 nt, synthetic construct
  source 1..22: mol_type = other RNA
cttgcatgcacttgtccagtgc

SEQ ID NO: 12526 - RNA, 22 nt, synthetic construct
  source 1..22: mol_type = other RNA
cttgcctgcttccagcttctcc

SEQ ID NO: 12527 - RNA, 22 nt, synthetic construct
  source 1..22: mol_type = other RNA
cttgtccagtgctccaggtgat

SEQ ID NO: 12528 - RNA, 22 nt, synthetic construct
  source 1..22: mol_type = other RNA
ctttgtgttggtgctatcacct

SEQ ID NO: 12529 - RNA, 22 nt, synthetic construct
  source 1..22: mol_type = other RNA
gaacttgcctgcttccagcttc

SEQ ID NO: 12530 - RNA, 22 nt, synthetic construct
  source 1..22: mol_type = other RNA
gaagacactgaagccatgcagc

SEQ ID NO: 12531 - RNA, 22 nt, synthetic construct
  source 1..22: mol_type = other RNA
gaagcaggcaagttcgaggaca

SEQ ID NO: 12532 - RNA, 22 nt, synthetic construct
  source 1..22: mol_type = other RNA
gaagcataggcaggcacctacc

SEQ ID NO: 12533 - RNA, 22 nt, synthetic construct
  source 1..22: mol_type = other RNA
gaagccatgcagctgcaggtgc

SEQ ID NO: 12534 - RNA, 22 nt, synthetic construct
  source 1..22: mol_type = other RNA
gaagctggaagcaggcaagttc

SEQ ID NO: 12535 - RNA, 22 nt, synthetic construct
  source 1..22: mol_type = other RNA
gaaggtgcacctgcagctgcat

SEQ ID NO: 12536 - RNA, 22 nt, synthetic construct
  source 1..22: mol_type = other RNA
gacaaactcatccagagtgtca

SEQ ID NO: 12537 - RNA, 22 nt, synthetic construct
  source 1..22: mol_type = other RNA
gacaagtgcatgcaagaccatg

SEQ ID NO: 12538 - RNA, 22 nt, synthetic construct
  source 1..22: mol_type = other RNA
gacactctggatgagtttgtcc

SEQ ID NO: 12539 - RNA, 22 nt, synthetic construct
  source 1..22: mol_type = other RNA
gacactgaagccatgcagctgc

SEQ ID NO: 12540 - RNA, 22 nt, synthetic construct
  source 1..22: mol_type = other RNA
gaccatgactgcaaggattggg

SEQ ID NO: 12541 - RNA, 22 nt, synthetic construct
  source 1..22: mol_type = other RNA
gaccgcagaagcataggcaggc

SEQ ID NO: 12542 - RNA, 22 nt, synthetic construct
  source 1..22: mol_type = other RNA
gactgcaaggattgggtgcata

SEQ ID NO: 12543 - RNA, 22 nt, synthetic construct
  source 1..22: mol_type = other RNA
gagaagctggaagcaggcaagt

SEQ ID NO: 12544 - RNA, 22 nt, synthetic construct
  source 1..22: mol_type = other RNA
gagcactggacaagtgcatgca

SEQ ID NO: 12545 - RNA, 22 nt, synthetic construct
  source 1..22: mol_type = other RNA
gaggacaaactcatccagagtg

SEQ ID NO: 12546 - RNA, 22 nt, synthetic construct
  source 1..22: mol_type = other RNA
gagtgtcatgggtgcccgcaac

SEQ ID NO: 12547 - RNA, 22 nt, synthetic construct
  source 1..22: mol_type = other RNA
gagtttgtcctcgaacttgcct

SEQ ID NO: 12548 - RNA, 22 nt, synthetic construct
  source 1..22: mol_type = other RNA
gatagcaccaacacaaagttgc

SEQ ID NO: 12549 - RNA, 22 nt, synthetic construct
  source 1..22: mol_type = other RNA
gatgagtttgtcctcgaacttg

SEQ ID NO: 12550 - RNA, 22 nt, synthetic construct
  source 1..22: mol_type = other RNA
gatgtggagaagctggaagcag

SEQ ID NO: 12551 - RNA, 22 nt, synthetic construct
  source 1..22: mol_type = other RNA
gattgggtgcataaggtaggtg

SEQ ID NO: 12552 - RNA, 22 nt, synthetic construct
  source 1..22: mol_type = other RNA
gcaactttgtgttggtgctatc

SEQ ID NO: 12553 - RNA, 22 nt, synthetic construct
  source 1..22: mol_type = other RNA
gcaagaccatgactgcaaggat

SEQ ID NO: 12554 - RNA, 22 nt, synthetic construct
  source 1..22: mol_type = other RNA
gcaaggattgggtgcataaggt

SEQ ID NO: 12555 - RNA, 22 nt, synthetic construct
  source 1..22: mol_type = other RNA
gcaagttcgaggacaaactcat

SEQ ID NO: 12556 - RNA, 22 nt, synthetic construct
  source 1..22: mol_type = other RNA
gcaccaacacaaagttgcgggc

SEQ ID NO: 12557 - RNA, 22 nt, synthetic construct
  source 1..22: mol_type = other RNA
gcacccaatccttgcagtcatg

SEQ ID NO: 12558 - RNA, 22 nt, synthetic construct
  source 1..22: mol_type = other RNA
gcacccatgacactctggatga

SEQ ID NO: 12559 - RNA, 22 nt, synthetic construct
  source 1..22: mol_type = other RNA
gcacctaccttatgcacccaat

SEQ ID NO: 12560 - RNA, 22 nt, synthetic construct
  source 1..22: mol_type = other RNA
gcacctgcagctgcatggcttc

SEQ ID NO: 12561 - RNA, 22 nt, synthetic construct
  source 1..22: mol_type = other RNA
gcactggacaagtgcatgcaag

SEQ ID NO: 12562 - RNA, 22 nt, synthetic construct
  source 1..22: mol_type = other RNA
gcacttgtccagtgctccaggt

SEQ ID NO: 12563 - RNA, 22 nt, synthetic construct
  source 1..22: mol_type = other RNA
gcagaagcataggcaggcacct

SEQ ID NO: 12564 - RNA, 22 nt, synthetic construct
  source 1..22: mol_type = other RNA
gcagctgcatggcttcagtgtc

SEQ ID NO: 12565 - RNA, 22 nt, synthetic construct
  source 1..22: mol_type = other RNA
gcaggcaagttcgaggacaaac

SEQ ID NO: 12566 - RNA, 22 nt, synthetic construct
  source 1..22: mol_type = other RNA
gcaggcacctaccttatgcacc

SEQ ID NO: 12567 - RNA, 22 nt, synthetic construct
  source 1..22: mol_type = other RNA
gcagtcatggtcttgcatgcac

SEQ ID NO: 12568 - RNA, 22 nt, synthetic construct
  source 1..22: mol_type = other RNA
gcataaggtaggtgcctgccta

SEQ ID NO: 12569 - RNA, 22 nt, synthetic construct
  source 1..22: mol_type = other RNA
gcataggcaggcacctacctta

SEQ ID NO: 12570 - RNA, 22 nt, synthetic construct
  source 1..22: mol_type = other RNA
gcatgcaagaccatgactgcaa

SEQ ID NO: 12571 - RNA, 22 nt, synthetic construct
  source 1..22: mol_type = other RNA
gcatgcacttgtccagtgctcc

SEQ ID NO: 12572 - RNA, 22 nt, synthetic construct
  source 1..22: mol_type = other RNA
gcatggcttcagtgtcttcatt

SEQ ID NO: 12573 - RNA, 22 nt, synthetic construct
  source 1..22: mol_type = other RNA
gccatgcagctgcaggtgcacc

SEQ ID NO: 12574 - RNA, 22 nt, synthetic construct
  source 1..22: mol_type = other RNA
gcccgcaactttgtgttggtgc

SEQ ID NO: 12575 - RNA, 22 nt, synthetic construct
  source 1..22: mol_type = other RNA
gcctgcttccagcttctccaca

SEQ ID NO: 12576 - RNA, 22 nt, synthetic construct
  source 1..22: mol_type = other RNA
gcgggcacccatgacactctgg

SEQ ID NO: 12577 - RNA, 22 nt, synthetic construct
  source 1..22: mol_type = other RNA
gctatcacctggagcactggac

SEQ ID NO: 12578 - RNA, 22 nt, synthetic construct
  source 1..22: mol_type = other RNA
gctccaggtgatagcaccaaca

SEQ ID NO: 12579 - RNA, 22 nt, synthetic construct
  source 1..22: mol_type = other RNA
gctgcatggcttcagtgtcttc

SEQ ID NO: 12580 - RNA, 22 nt, synthetic construct
  source 1..22: mol_type = other RNA
gctggaagcaggcaagttcgag

SEQ ID NO: 12581 - RNA, 22 nt, synthetic construct
  source 1..22: mol_type = other RNA
gcttcagtgtcttcattgatgt

SEQ ID NO: 12582 - RNA, 22 nt, synthetic construct
  source 1..22: mol_type = other RNA
gcttccagcttctccacatcaa

SEQ ID NO: 12583 - RNA, 22 nt, synthetic construct
  source 1..22: mol_type = other RNA
gcttctccacatcaatgaagac

SEQ ID NO: 12584 - RNA, 22 nt, synthetic construct
  source 1..22: mol_type = other RNA
ggaagcaggcaagttcgaggac

SEQ ID NO: 12585 - RNA, 22 nt, synthetic construct
  source 1..22: mol_type = other RNA
ggacaaactcatccagagtgtc

SEQ ID NO: 12586 - RNA, 22 nt, synthetic construct
  source 1..22: mol_type = other RNA
ggacaagtgcatgcaagaccat

SEQ ID NO: 12587 - RNA, 22 nt, synthetic construct
  source 1..22: mol_type = other RNA
ggaccgcagaagcataggcagg

SEQ ID NO: 12588 - RNA, 22 nt, synthetic construct
  source 1..22: mol_type = other RNA
ggagaagctggaagcaggcaag

SEQ ID NO: 12589 - RNA, 22 nt, synthetic construct
  source 1..22: mol_type = other RNA
ggagcactggacaagtgcatgc

SEQ ID NO: 12590 - RNA, 22 nt, synthetic construct
  source 1..22: mol_type = other RNA
ggatgagtttgtcctcgaactt

SEQ ID NO: 12591 - RNA, 22 nt, synthetic construct
  source 1..22: mol_type = other RNA
ggattgggtgcataaggtaggt

SEQ ID NO: 12592 - RNA, 22 nt, synthetic construct
  source 1..22: mol_type = other RNA
ggcaagttcgaggacaaactca

SEQ ID NO: 12593 - RNA, 22 nt, synthetic construct
  source 1..22: mol_type = other RNA
ggcacccatgacactctggatg

SEQ ID NO: 12594 - RNA, 22 nt, synthetic construct
  source 1..22: mol_type = other RNA
ggcacctaccttatgcacccaa

SEQ ID NO: 12595 - RNA, 22 nt, synthetic construct
  source 1..22: mol_type = other RNA
ggcaggcacctaccttatgcac

SEQ ID NO: 12596 - RNA, 22 nt, synthetic construct
  source 1..22: mol_type = other RNA
ggcttcagtgtcttcattgatg

SEQ ID NO: 12597 - RNA, 22 nt, synthetic construct
  source 1..22: mol_type = other RNA
gggaccgcagaagcataggcag

SEQ ID NO: 12598 - RNA, 22 nt, synthetic construct
  source 1..22: mol_type = other RNA
gggcacccatgacactctggat

SEQ ID NO: 12599 - RNA, 22 nt, synthetic construct
  source 1..22: mol_type = other RNA
gggtgcataaggtaggtgcctg

SEQ ID NO: 12600 - RNA, 22 nt, synthetic construct
  source 1..22: mol_type = other RNA
gggtgcccgcaactttgtgttg

SEQ ID NO: 12601 - RNA, 22 nt, synthetic construct
  source 1..22: mol_type = other RNA
ggtaggtgcctgcctatgcttc

SEQ ID NO: 12602 - RNA, 22 nt, synthetic construct
  source 1..22: mol_type = other RNA
ggtcttgcatgcacttgtccag

SEQ ID NO: 12603 - RNA, 22 nt, synthetic construct
  source 1..22: mol_type = other RNA
ggtgatagcaccaacacaaagt

SEQ ID NO: 12604 - RNA, 22 nt, synthetic construct
  source 1..22: mol_type = other RNA
ggtgcacctgcagctgcatggc

SEQ ID NO: 12605 - RNA, 22 nt, synthetic construct
  source 1..22: mol_type = other RNA
ggtgcataaggtaggtgcctgc

SEQ ID NO: 12606 - RNA, 22 nt, synthetic construct
  source 1..22: mol_type = other RNA
ggtgcccgcaactttgtgttgg

SEQ ID NO: 12607 - RNA, 22 nt, synthetic construct
  source 1..22: mol_type = other RNA
ggtgctatcacctggagcactg

SEQ ID NO: 12608 - RNA, 22 nt, synthetic construct
  source 1..22: mol_type = other RNA
gtaggtgcctgcctatgcttct

SEQ ID NO: 12609 - RNA, 22 nt, synthetic construct
  source 1..22: mol_type = other RNA
gtcatgggtgcccgcaactttg

SEQ ID NO: 12610 - RNA, 22 nt, synthetic construct
  source 1..22: mol_type = other RNA
gtcatggtcttgcatgcacttg

SEQ ID NO: 12611 - RNA, 22 nt, synthetic construct
  source 1..22: mol_type = other RNA
gtccagtgctccaggtgatagc

SEQ ID NO: 12612 - RNA, 22 nt, synthetic construct
  source 1..22: mol_type = other RNA
gtcctcgaacttgcctgcttcc

SEQ ID NO: 12613 - RNA, 22 nt, synthetic construct
  source 1..22: mol_type = other RNA
gtcttcattgatgtggagaagc

SEQ ID NO: 12614 - RNA, 22 nt, synthetic construct
  source 1..22: mol_type = other RNA
gtcttgcatgcacttgtccagt

SEQ ID NO: 12615 - RNA, 22 nt, synthetic construct
  source 1..22: mol_type = other RNA
gtgatagcaccaacacaaagtt

SEQ ID NO: 12616 - RNA, 22 nt, synthetic construct
  source 1..22: mol_type = other RNA
gtgcacctgcagctgcatggct

SEQ ID NO: 12617 - RNA, 22 nt, synthetic construct
  source 1..22: mol_type = other RNA
gtgcataaggtaggtgcctgcc

SEQ ID NO: 12618 - RNA, 22 nt, synthetic construct
  source 1..22: mol_type = other RNA
gtgcatgcaagaccatgactgc

SEQ ID NO: 12619 - RNA, 22 nt, synthetic construct
  source 1..22: mol_type = other RNA
gtgcccgcaactttgtgttggt

SEQ ID NO: 12620 - RNA, 22 nt, synthetic construct
  source 1..22: mol_type = other RNA
gtgctatcacctggagcactgg

SEQ ID NO: 12621 - RNA, 22 nt, synthetic construct
  source 1..22: mol_type = other RNA
gtgctccaggtgatagcaccaa

SEQ ID NO: 12622 - RNA, 22 nt, synthetic construct
  source 1..22: mol_type = other RNA
gtggagaagctggaagcaggca

SEQ ID NO: 12623 - RNA, 22 nt, synthetic construct
  source 1..22: mol_type = other RNA
gtgtcatgggtgcccgcaactt

SEQ ID NO: 12624 - RNA, 22 nt, synthetic construct
  source 1..22: mol_type = other RNA
gtgtcttcattgatgtggagaa

SEQ ID NO: 12625 - RNA, 22 nt, synthetic construct
  source 1..22: mol_type = other RNA
gtgttggtgctatcacctggag

SEQ ID NO: 12626 - RNA, 22 nt, synthetic construct
  source 1..22: mol_type = other RNA
gttcgaggacaaactcatccag

SEQ ID NO: 12627 - RNA, 22 nt, synthetic construct
  source 1..22: mol_type = other RNA
gttgcgggcacccatgacactc

SEQ ID NO: 12628 - RNA, 22 nt, synthetic construct
  source 1..22: mol_type = other RNA
gttggtgctatcacctggagca

SEQ ID NO: 12629 - RNA, 22 nt, synthetic construct
  source 1..22: mol_type = other RNA
gtttgtcctcgaacttgcctgc

SEQ ID NO: 12630 - RNA, 22 nt, synthetic construct
  source 1..22: mol_type = other RNA
taaggtaggtgcctgcctatgc

SEQ ID NO: 12631 - RNA, 22 nt, synthetic construct
  source 1..22: mol_type = other RNA
taccttatgcacccaatccttg

SEQ ID NO: 12632 - RNA, 22 nt, synthetic construct
  source 1..22: mol_type = other RNA
tagcaccaacacaaagttgcgg

SEQ ID NO: 12633 - RNA, 22 nt, synthetic construct
  source 1..22: mol_type = other RNA
taggcaggcacctaccttatgc

SEQ ID NO: 12634 - RNA, 22 nt, synthetic construct
  source 1..22: mol_type = other RNA
tatcacctggagcactggacaa

SEQ ID NO: 12635 - RNA, 22 nt, synthetic construct
  source 1..22: mol_type = other RNA
tatgcacccaatccttgcagtc

SEQ ID NO: 12636 - RNA, 22 nt, synthetic construct
  source 1..22: mol_type = other RNA
tcaatgaagacactgaagccat

SEQ ID NO: 12637 - RNA, 22 nt, synthetic construct
  source 1..22: mol_type = other RNA
tcacctggagcactggacaagt

SEQ ID NO: 12638 - RNA, 22 nt, synthetic construct
  source 1..22: mol_type = other RNA
tcagtgtcttcattgatgtgga

SEQ ID NO: 12639 - RNA, 22 nt, synthetic construct
  source 1..22: mol_type = other RNA
tcatccagagtgtcatgggtgc

SEQ ID NO: 12640 - RNA, 22 nt, synthetic construct
  source 1..22: mol_type = other RNA
tcatgggtgcccgcaactttgt

SEQ ID NO: 12641 - RNA, 22 nt, synthetic construct
  source 1..22: mol_type = other RNA
tcatggtcttgcatgcacttgt

SEQ ID NO: 12642 - RNA, 22 nt, synthetic construct
  source 1..22: mol_type = other RNA
tcattgatgtggagaagctgga

SEQ ID NO: 12643 - RNA, 22 nt, synthetic construct
  source 1..22: mol_type = other RNA
tccacatcaatgaagacactga

SEQ ID NO: 12644 - RNA, 22 nt, synthetic construct
  source 1..22: mol_type = other RNA
tccagagtgtcatgggtgcccg

SEQ ID NO: 12645 - RNA, 22 nt, synthetic construct
  source 1..22: mol_type = other RNA
tccagcttctccacatcaatga

SEQ ID NO: 12646 - RNA, 22 nt, synthetic construct
  source 1..22: mol_type = other RNA
tccaggtgatagcaccaacaca

SEQ ID NO: 12647 - RNA, 22 nt, synthetic construct
  source 1..22: mol_type = other RNA
tccagtgctccaggtgatagca

SEQ ID NO: 12648 - RNA, 22 nt, synthetic construct
  source 1..22: mol_type = other RNA
tcctcgaacttgcctgcttcca

SEQ ID NO: 12649 - RNA, 22 nt, synthetic construct
  source 1..22: mol_type = other RNA
tcctgaaggtgcacctgcagct

SEQ ID NO: 12650 - RNA, 22 nt, synthetic construct
  source 1..22: mol_type = other RNA
tccttgcagtcatggtcttgca

SEQ ID NO: 12651 - RNA, 22 nt, synthetic construct
  source 1..22: mol_type = other RNA
tcgaacttgcctgcttccagct

SEQ ID NO: 12652 - RNA, 22 nt, synthetic construct
  source 1..22: mol_type = other RNA
tcgaggacaaactcatccagag

SEQ ID NO: 12653 - RNA, 22 nt, synthetic construct
  source 1..22: mol_type = other RNA
tctccacatcaatgaagacact

SEQ ID NO: 12654 - RNA, 22 nt, synthetic construct
  source 1..22: mol_type = other RNA
tctcctgaaggtgcacctgcag

SEQ ID NO: 12655 - RNA, 22 nt, synthetic construct
  source 1..22: mol_type = other RNA
tctggatgagtttgtcctcgaa

SEQ ID NO: 12656 - RNA, 22 nt, synthetic construct
  source 1..22: mol_type = other RNA
tcttcattgatgtggagaagct

SEQ ID NO: 12657 - RNA, 22 nt, synthetic construct
  source 1..22: mol_type = other RNA
tcttgcatgcacttgtccagtg

SEQ ID NO: 12658 - RNA, 22 nt, synthetic construct
  source 1..22: mol_type = other RNA
tgaagacactgaagccatgcag

SEQ ID NO: 12659 - RNA, 22 nt, synthetic construct
  source 1..22: mol_type = other RNA
tgaagccatgcagctgcaggtg

SEQ ID NO: 12660 - RNA, 22 nt, synthetic construct
  source 1..22: mol_type = other RNA
tgaaggtgcacctgcagctgca

SEQ ID NO: 12661 - RNA, 22 nt, synthetic construct
  source 1..22: mol_type = other RNA
tgacactctggatgagtttgtc

SEQ ID NO: 12662 - RNA, 22 nt, synthetic construct
  source 1..22: mol_type = other RNA
tgactgcaaggattgggtgcat

SEQ ID NO: 12663 - RNA, 22 nt, synthetic construct
  source 1..22: mol_type = other RNA
tgagtttgtcctcgaacttgcc

SEQ ID NO: 12664 - RNA, 22 nt, synthetic construct
  source 1..22: mol_type = other RNA
tgatagcaccaacacaaagttg

SEQ ID NO: 12665 - RNA, 22 nt, synthetic construct
  source 1..22: mol_type = other RNA
tgatgtggagaagctggaagca

SEQ ID NO: 12666 - RNA, 22 nt, synthetic construct
  source 1..22: mol_type = other RNA
tgcaagaccatgactgcaagga

SEQ ID NO: 12667 - RNA, 22 nt, synthetic construct
  source 1..22: mol_type = other RNA
tgcaaggattgggtgcataagg

SEQ ID NO: 12668 - RNA, 22 nt, synthetic construct
  source 1..22: mol_type = other RNA
tgcacccaatccttgcagtcat

SEQ ID NO: 12669 - RNA, 22 nt, synthetic construct
  source 1..22: mol_type = other RNA
tgcacctgcagctgcatggctt

SEQ ID NO: 12670 - RNA, 22 nt, synthetic construct
  source 1..22: mol_type = other RNA
tgcacttgtccagtgctccagg

SEQ ID NO: 12671 - RNA, 22 nt, synthetic construct
  source 1..22: mol_type = other RNA
tgcagctgcatggcttcagtgt

SEQ ID NO: 12672 - RNA, 22 nt, synthetic construct
  source 1..22: mol_type = other RNA
tgcagtcatggtcttgcatgca

SEQ ID NO: 12673 - RNA, 22 nt, synthetic construct
  source 1..22: mol_type = other RNA
tgcataaggtaggtgcctgcct

SEQ ID NO: 12674 - RNA, 22 nt, synthetic construct
  source 1..22: mol_type = other RNA
tgcatgcaagaccatgactgca

SEQ ID NO: 12675 - RNA, 22 nt, synthetic construct
  source 1..22: mol_type = other RNA
tgcatgcacttgtccagtgctc

SEQ ID NO: 12676 - RNA, 22 nt, synthetic construct
  source 1..22: mol_type = other RNA
tgcatggcttcagtgtcttcat

SEQ ID NO: 12677 - RNA, 22 nt, synthetic construct
  source 1..22: mol_type = other RNA
tgcccgcaactttgtgttggtg

SEQ ID NO: 12678 - RNA, 22 nt, synthetic construct
  source 1..22: mol_type = other RNA
tgcctgcttccagcttctccac

SEQ ID NO: 12679 - RNA, 22 nt, synthetic construct
  source 1..22: mol_type = other RNA
tgcgggcacccatgacactctg

SEQ ID NO: 12680 - RNA, 22 nt, synthetic construct
  source 1..22: mol_type = other RNA
tgctatcacctggagcactgga

SEQ ID NO: 12681 - RNA, 22 nt, synthetic construct
  source 1..22: mol_type = other RNA
tgctccaggtgatagcaccaac

SEQ ID NO: 12682 - RNA, 22 nt, synthetic construct
  source 1..22: mol_type = other RNA
tgcttccagcttctccacatca

SEQ ID NO: 12683 - RNA, 22 nt, synthetic construct
  source 1..22: mol_type = other RNA
tggaagcaggcaagttcgagga

SEQ ID NO: 12684 - RNA, 22 nt, synthetic construct
  source 1..22: mol_type = other RNA
tggacaagtgcatgcaagacca

SEQ ID NO: 12685 - RNA, 22 nt, synthetic construct
  source 1..22: mol_type = other RNA
tggagaagctggaagcaggcaa

SEQ ID NO: 12686 - RNA, 22 nt, synthetic construct
  source 1..22: mol_type = other RNA
tggagcactggacaagtgcatg

SEQ ID NO: 12687 - RNA, 22 nt, synthetic construct
  source 1..22: mol_type = other RNA
tggatgagtttgtcctcgaact

SEQ ID NO: 12688 - RNA, 22 nt, synthetic construct
  source 1..22: mol_type = other RNA
tggcttcagtgtcttcattgat

SEQ ID NO: 12689 - RNA, 22 nt, synthetic construct
  source 1..22: mol_type = other RNA
tgggtgcataaggtaggtgcct

SEQ ID NO: 12690 - RNA, 22 nt, synthetic construct
  source 1..22: mol_type = other RNA
tgggtgcccgcaactttgtgtt

SEQ ID NO: 12691 - RNA, 22 nt, synthetic construct
  source 1..22: mol_type = other RNA
tggtcttgcatgcacttgtcca

SEQ ID NO: 12692 - RNA, 22 nt, synthetic construct
  source 1..22: mol_type = other RNA
tggtgctatcacctggagcact

SEQ ID NO: 12693 - RNA, 22 nt, synthetic construct
  source 1..22: mol_type = other RNA
tgtcatgggtgcccgcaacttt

SEQ ID NO: 12694 - RNA, 22 nt, synthetic construct
  source 1..22: mol_type = other RNA
tgtccagtgctccaggtgatag

SEQ ID NO: 12695 - RNA, 22 nt, synthetic construct
  source 1..22: mol_type = other RNA
tgtcctcgaacttgcctgcttc

SEQ ID NO: 12696 - RNA, 22 nt, synthetic construct
  source 1..22: mol_type = other RNA
tgtcttcattgatgtggagaag

SEQ ID NO: 12697 - RNA, 22 nt, synthetic construct
  source 1..22: mol_type = other RNA
tgtggagaagctggaagcaggc

SEQ ID NO: 12698 - RNA, 22 nt, synthetic construct
  source 1..22: mol_type = other RNA
tgtgttggtgctatcacctgga

SEQ ID NO: 12699 - RNA, 22 nt, synthetic construct
  source 1..22: mol_type = other RNA
tgttggtgctatcacctggagc

SEQ ID NO: 12700 - RNA, 22 nt, synthetic construct
  source 1..22: mol_type = other RNA
ttatgcacccaatccttgcagt

SEQ ID NO: 12701 - RNA, 22 nt, synthetic construct
  source 1..22: mol_type = other RNA
ttcagtgtcttcattgatgtgg

SEQ ID NO: 12702 - RNA, 22 nt, synthetic construct
  source 1..22: mol_type = other RNA
ttcattgatgtggagaagctgg

SEQ ID NO: 12703 - RNA, 22 nt, synthetic construct
  source 1..22: mol_type = other RNA
ttccagcttctccacatcaatg

SEQ ID NO: 12704 - RNA, 22 nt, synthetic construct
  source 1..22: mol_type = other RNA
ttcgaggacaaactcatccaga

SEQ ID NO: 12705 - RNA, 22 nt, synthetic construct
  source 1..22: mol_type = other RNA
ttctccacatcaatgaagacac

SEQ ID NO: 12706 - RNA, 22 nt, synthetic construct
  source 1..22: mol_type = other RNA
ttgatgtggagaagctggaagc

SEQ ID NO: 12707 - RNA, 22 nt, synthetic construct
  source 1..22: mol_type = other RNA
ttgcagtcatggtcttgcatgc

SEQ ID NO: 12708 - RNA, 22 nt, synthetic construct
  source 1..22: mol_type = other RNA
ttgcatgcacttgtccagtgct

SEQ ID NO: 12709 - RNA, 22 nt, synthetic construct
  source 1..22: mol_type = other RNA
ttgcctgcttccagcttctcca

SEQ ID NO: 12710 - RNA, 22 nt, synthetic construct
  source 1..22: mol_type = other RNA
ttgcgggcacccatgacactct

SEQ ID NO: 12711 - RNA, 22 nt, synthetic construct
  source 1..22: mol_type = other RNA
ttgggtgcataaggtaggtgcc

SEQ ID NO: 12712 - RNA, 22 nt, synthetic construct
  source 1..22: mol_type = other RNA
ttggtgctatcacctggagcac

SEQ ID NO: 12713 - RNA, 22 nt, synthetic construct
  source 1..22: mol_type = other RNA
ttgtccagtgctccaggtgata

SEQ ID NO: 12714 - RNA, 22 nt, synthetic construct
  source 1..22: mol_type = other RNA
ttgtcctcgaacttgcctgctt

SEQ ID NO: 12715 - RNA, 22 nt, synthetic construct
  source 1..22: mol_type = other RNA
ttgtgttggtgctatcacctgg

SEQ ID NO: 12716 - RNA, 22 nt, synthetic construct
  source 1..22: mol_type = other RNA
tttgtcctcgaacttgcctgct

SEQ ID NO: 12717 - RNA, 22 nt, synthetic construct
  source 1..22: mol_type = other RNA
tttgtgttggtgctatcacctg

SEQ ID NO: 12718 - RNA, 20 nt, synthetic construct
  source 1..20: mol_type = other RNA
aaagtaagcacagcctgcat

SEQ ID NO: 12719 - RNA, 20 nt, synthetic construct
  source 1..20: mol_type = other RNA
aacattgtgcccatcattga

SEQ ID NO: 12720 - RNA, 20 nt, synthetic construct
  source 1..20: mol_type = other RNA
aacggtatcaagtgagcccc

SEQ ID NO: 12721 - RNA, 20 nt, synthetic construct
  source 1..20: mol_type = other RNA
aagaacattgtgcccatcat

SEQ ID NO: 12722 - RNA, 20 nt, synthetic construct
  source 1..20: mol_type = other RNA
aagcacagcctgcatgtcct

SEQ ID NO: 12723 - RNA, 20 nt, synthetic construct
  source 1..20: mol_type = other RNA
aagccatcaatgatgggcac

SEQ ID NO: 12724 - RNA, 20 nt, synthetic construct
  source 1..20: mol_type = other RNA
aagctgcggcaagaacattg

SEQ ID NO: 12725 - RNA, 20 nt, synthetic construct
  source 1..20: mol_type = other RNA
aagtaagcacagcctgcatg

SEQ ID NO: 12726 - RNA, 20 nt, synthetic construct
  source 1..20: mol_type = other RNA
aagtgagccccagggccctg

SEQ ID NO: 12727 - RNA, 20 nt, synthetic construct
  source 1..20: mol_type = other RNA
aatgatgggcacaatgttct

SEQ ID NO: 12728 - RNA, 20 nt, synthetic construct
  source 1..20: mol_type = other RNA
aatgttcttgccgcagctta

SEQ ID NO: 12729 - RNA, 20 nt, synthetic construct
  source 1..20: mol_type = other RNA
acaatgttcttgccgcagct

SEQ ID NO: 12730 - RNA, 20 nt, synthetic construct
  source 1..20: mol_type = other RNA
acagcctgcatgtcctcagg

SEQ ID NO: 12731 - RNA, 20 nt, synthetic construct
  source 1..20: mol_type = other RNA
acatgcaggctgtgcttact

SEQ ID NO: 12732 - RNA, 20 nt, synthetic construct
  source 1..20: mol_type = other RNA
acattgtgcccatcattgat

SEQ ID NO: 12733 - RNA, 20 nt, synthetic construct
  source 1..20: mol_type = other RNA
accgttgaaagtaagcacag

SEQ ID NO: 12734 - RNA, 20 nt, synthetic construct
  source 1..20: mol_type = other RNA
acctggggctcaggccactc

SEQ ID NO: 12735 - RNA, 20 nt, synthetic construct
  source 1..20: mol_type = other RNA
acggtatcaagtgagcccca

SEQ ID NO: 12736 - RNA, 20 nt, synthetic construct
  source 1..20: mol_type = other RNA
actcgaagccatcaatgatg

SEQ ID NO: 12737 - RNA, 20 nt, synthetic construct
  source 1..20: mol_type = other RNA
actgctttaagctgcggcaa

SEQ ID NO: 12738 - RNA, 20 nt, synthetic construct
  source 1..20: mol_type = other RNA
acttgataccgttgaaagta

SEQ ID NO: 12739 - RNA, 20 nt, synthetic construct
  source 1..20: mol_type = other RNA
actttcaacggtatcaagtg

SEQ ID NO: 12740 - RNA, 20 nt, synthetic construct
  source 1..20: mol_type = other RNA
agaacattgtgcccatcatt

SEQ ID NO: 12741 - RNA, 20 nt, synthetic construct
  source 1..20: mol_type = other RNA
agattgtgactgctttaagc

SEQ ID NO: 12742 - RNA, 20 nt, synthetic construct
  source 1..20: mol_type = other RNA
agcacagcctgcatgtcctc

SEQ ID NO: 12743 - RNA, 20 nt, synthetic construct
  source 1..20: mol_type = other RNA
agccatcaatgatgggcaca

SEQ ID NO: 12744 - RNA, 20 nt, synthetic construct
  source 1..20: mol_type = other RNA
agccccaggtcctgcctgag

SEQ ID NO: 12745 - RNA, 20 nt, synthetic construct
  source 1..20: mol_type = other RNA
agcctgcatgtcctcaggca

SEQ ID NO: 12746 - RNA, 20 nt, synthetic construct
  source 1..20: mol_type = other RNA
agctgcggcaagaacattgt

SEQ ID NO: 12747 - RNA, 20 nt, synthetic construct
  source 1..20: mol_type = other RNA
aggacatgcaggctgtgctt

SEQ ID NO: 12748 - RNA, 20 nt, synthetic construct
  source 1..20: mol_type = other RNA
aggacctggggctcaggcca

SEQ ID NO: 12749 - RNA, 20 nt, synthetic construct
  source 1..20: mol_type = other RNA
aggcaggacctggggctcag

SEQ ID NO: 12750 - RNA, 20 nt, synthetic construct
  source 1..20: mol_type = other RNA
aggccactcgaagccatcaa

SEQ ID NO: 12751 - RNA, 20 nt, synthetic construct
  source 1..20: mol_type = other RNA
aggctgtgcttactttcaac

SEQ ID NO: 12752 - RNA, 20 nt, synthetic construct
  source 1..20: mol_type = other RNA
agggccctggggctcacttg

SEQ ID NO: 12753 - RNA, 20 nt, synthetic construct
  source 1..20: mol_type = other RNA
aggtcctgcctgaggacatg

SEQ ID NO: 12754 - RNA, 20 nt, synthetic construct
  source 1..20: mol_type = other RNA
agtaagcacagcctgcatgt

SEQ ID NO: 12755 - RNA, 20 nt, synthetic construct
  source 1..20: mol_type = other RNA
agtgagccccagggccctgg

SEQ ID NO: 12756 - RNA, 20 nt, synthetic construct
  source 1..20: mol_type = other RNA
agtggcctgagccccaggtc

SEQ ID NO: 12757 - RNA, 20 nt, synthetic construct
  source 1..20: mol_type = other RNA
ataccgttgaaagtaagcac

SEQ ID NO: 12758 - RNA, 20 nt, synthetic construct
  source 1..20: mol_type = other RNA
atcaagtgagccccagggcc

SEQ ID NO: 12759 - RNA, 20 nt, synthetic construct
  source 1..20: mol_type = other RNA
atcaatgatgggcacaatgt

SEQ ID NO: 12760 - RNA, 20 nt, synthetic construct
  source 1..20: mol_type = other RNA
atcattgatggcttcgagtg

SEQ ID NO: 12761 - RNA, 20 nt, synthetic construct
  source 1..20: mol_type = other RNA
atgatgggcacaatgttctt

SEQ ID NO: 12762 - RNA, 20 nt, synthetic construct
  source 1..20: mol_type = other RNA
atgcaggctgtgcttacttt

SEQ ID NO: 12763 - RNA, 20 nt, synthetic construct
  source 1..20: mol_type = other RNA
atggcttcgagtggcctgag

SEQ ID NO: 12764 - RNA, 20 nt, synthetic construct
  source 1..20: mol_type = other RNA
atgggcacaatgttcttgcc

SEQ ID NO: 12765 - RNA, 20 nt, synthetic construct
  source 1..20: mol_type = other RNA
atgtcctcaggcaggacctg

SEQ ID NO: 12766 - RNA, 20 nt, synthetic construct
  source 1..20: mol_type = other RNA
atgttcttgccgcagcttaa

SEQ ID NO: 12767 - RNA, 20 nt, synthetic construct
  source 1..20: mol_type = other RNA
attgatggcttcgagtggcc

SEQ ID NO: 12768 - RNA, 20 nt, synthetic construct
  source 1..20: mol_type = other RNA
attgtgactgctttaagctg

SEQ ID NO: 12769 - RNA, 20 nt, synthetic construct
  source 1..20: mol_type = other RNA
attgtgcccatcattgatgg

SEQ ID NO: 12770 - RNA, 20 nt, synthetic construct
  source 1..20: mol_type = other RNA
caacggtatcaagtgagccc

SEQ ID NO: 12771 - RNA, 20 nt, synthetic construct
  source 1..20: mol_type = other RNA
caagaacattgtgcccatca

SEQ ID NO: 12772 - RNA, 20 nt, synthetic construct
  source 1..20: mol_type = other RNA
caagtgagccccagggccct

SEQ ID NO: 12773 - RNA, 20 nt, synthetic construct
  source 1..20: mol_type = other RNA
caatgatgggcacaatgttc

SEQ ID NO: 12774 - RNA, 20 nt, synthetic construct
  source 1..20: mol_type = other RNA
caatgttcttgccgcagctt

SEQ ID NO: 12775 - RNA, 20 nt, synthetic construct
  source 1..20: mol_type = other RNA
cacaatgttcttgccgcagc

SEQ ID NO: 12776 - RNA, 20 nt, synthetic construct
  source 1..20: mol_type = other RNA
cacagcctgcatgtcctcag

SEQ ID NO: 12777 - RNA, 20 nt, synthetic construct
  source 1..20: mol_type = other RNA
cactcgaagccatcaatgat

SEQ ID NO: 12778 - RNA, 20 nt, synthetic construct
  source 1..20: mol_type = other RNA
cacttgataccgttgaaagt

SEQ ID NO: 12779 - RNA, 20 nt, synthetic construct
  source 1..20: mol_type = other RNA
cagcctgcatgtcctcaggc

SEQ ID NO: 12780 - RNA, 20 nt, synthetic construct
  source 1..20: mol_type = other RNA
caggacctggggctcaggcc

SEQ ID NO: 12781 - RNA, 20 nt, synthetic construct
  source 1..20: mol_type = other RNA
caggcaggacctggggctca

SEQ ID NO: 12782 - RNA, 20 nt, synthetic construct
  source 1..20: mol_type = other RNA
caggccactcgaagccatca

SEQ ID NO: 12783 - RNA, 20 nt, synthetic construct
  source 1..20: mol_type = other RNA
caggctgtgcttactttcaa

SEQ ID NO: 12784 - RNA, 20 nt, synthetic construct
  source 1..20: mol_type = other RNA
cagggccctggggctcactt

SEQ ID NO: 12785 - RNA, 20 nt, synthetic construct
  source 1..20: mol_type = other RNA
caggtcctgcctgaggacat

SEQ ID NO: 12786 - RNA, 20 nt, synthetic construct
  source 1..20: mol_type = other RNA
catcaatgatgggcacaatg

SEQ ID NO: 12787 - RNA, 20 nt, synthetic construct
  source 1..20: mol_type = other RNA
catcattgatggcttcgagt

SEQ ID NO: 12788 - RNA, 20 nt, synthetic construct
  source 1..20: mol_type = other RNA
catgcaggctgtgcttactt

SEQ ID NO: 12789 - RNA, 20 nt, synthetic construct
  source 1..20: mol_type = other RNA
catgtcctcaggcaggacct

SEQ ID NO: 12790 - RNA, 20 nt, synthetic construct
  source 1..20: mol_type = other RNA
cattgatggcttcgagtggc

SEQ ID NO: 12791 - RNA, 20 nt, synthetic construct
  source 1..20: mol_type = other RNA
cattgtgcccatcattgatg

SEQ ID NO: 12792 - RNA, 20 nt, synthetic construct
  source 1..20: mol_type = other RNA
ccactcgaagccatcaatga

SEQ ID NO: 12793 - RNA, 20 nt, synthetic construct
  source 1..20: mol_type = other RNA
ccagggccctggggctcact

SEQ ID NO: 12794 - RNA, 20 nt, synthetic construct
  source 1..20: mol_type = other RNA
ccaggtcctgcctgaggaca

SEQ ID NO: 12795 - RNA, 20 nt, synthetic construct
  source 1..20: mol_type = other RNA
ccatcaatgatgggcacaat

SEQ ID NO: 12796 - RNA, 20 nt, synthetic construct
  source 1..20: mol_type = other RNA
ccatcattgatggcttcgag

SEQ ID NO: 12797 - RNA, 20 nt, synthetic construct
  source 1..20: mol_type = other RNA
cccagggccctggggctcac

SEQ ID NO: 12798 - RNA, 20 nt, synthetic construct
  source 1..20: mol_type = other RNA
cccaggtcctgcctgaggac

SEQ ID NO: 12799 - RNA, 20 nt, synthetic construct
  source 1..20: mol_type = other RNA
cccatcattgatggcttcga

SEQ ID NO: 12800 - RNA, 20 nt, synthetic construct
  source 1..20: mol_type = other RNA
ccccaggtcctgcctgagga

SEQ ID NO: 12801 - RNA, 20 nt, synthetic construct
  source 1..20: mol_type = other RNA
cccctggtcccagggccctg

SEQ ID NO: 12802 - RNA, 20 nt, synthetic construct
  source 1..20: mol_type = other RNA
ccctggggctcacttgatac

SEQ ID NO: 12803 - RNA, 20 nt, synthetic construct
  source 1..20: mol_type = other RNA
ccctggtcccagggccctgg

SEQ ID NO: 12804 - RNA, 20 nt, synthetic construct
  source 1..20: mol_type = other RNA
ccgttgaaagtaagcacagc

SEQ ID NO: 12805 - RNA, 20 nt, synthetic construct
  source 1..20: mol_type = other RNA
cctcaggcaggacctggggc

SEQ ID NO: 12806 - RNA, 20 nt, synthetic construct
  source 1..20: mol_type = other RNA
cctgagccccaggtcctgcc

SEQ ID NO: 12807 - RNA, 20 nt, synthetic construct
  source 1..20: mol_type = other RNA
cctgaggacatgcaggctgt

SEQ ID NO: 12808 - RNA, 20 nt, synthetic construct
  source 1..20: mol_type = other RNA
cctgcatgtcctcaggcagg

SEQ ID NO: 12809 - RNA, 20 nt, synthetic construct
  source 1..20: mol_type = other RNA
cctgcctgaggacatgcagg

SEQ ID NO: 12810 - RNA, 20 nt, synthetic construct
  source 1..20: mol_type = other RNA
cctggggctcacttgatacc

SEQ ID NO: 12811 - RNA, 20 nt, synthetic construct
  source 1..20: mol_type = other RNA
cctggggctcaggccactcg

SEQ ID NO: 12812 - RNA, 20 nt, synthetic construct
  source 1..20: mol_type = other RNA
cctggtcccagggccctggg

SEQ ID NO: 12813 - RNA, 20 nt, synthetic construct
  source 1..20: mol_type = other RNA
cgaagccatcaatgatgggc

SEQ ID NO: 12814 - RNA, 20 nt, synthetic construct
  source 1..20: mol_type = other RNA
cgagtggcctgagccccagg

SEQ ID NO: 12815 - RNA, 20 nt, synthetic construct
  source 1..20: mol_type = other RNA
cggcaagaacattgtgccca

SEQ ID NO: 12816 - RNA, 20 nt, synthetic construct
  source 1..20: mol_type = other RNA
cggtatcaagtgagccccag

SEQ ID NO: 12817 - RNA, 20 nt, synthetic construct
  source 1..20: mol_type = other RNA
cgttgaaagtaagcacagcc

SEQ ID NO: 12818 - RNA, 20 nt, synthetic construct
  source 1..20: mol_type = other RNA
ctcacttgataccgttgaaa

SEQ ID NO: 12819 - RNA, 20 nt, synthetic construct
  source 1..20: mol_type = other RNA
ctcaggcaggacctggggct

SEQ ID NO: 12820 - RNA, 20 nt, synthetic construct
  source 1..20: mol_type = other RNA
ctcaggccactcgaagccat

SEQ ID NO: 12821 - RNA, 20 nt, synthetic construct
  source 1..20: mol_type = other RNA
ctcgaagccatcaatgatgg

SEQ ID NO: 12822 - RNA, 20 nt, synthetic construct
  source 1..20: mol_type = other RNA
ctgagccccaggtcctgcct

SEQ ID NO: 12823 - RNA, 20 nt, synthetic construct
  source 1..20: mol_type = other RNA
ctgaggacatgcaggctgtg

SEQ ID NO: 12824 - RNA, 20 nt, synthetic construct
  source 1..20: mol_type = other RNA
ctgcatgtcctcaggcagga

SEQ ID NO: 12825 - RNA, 20 nt, synthetic construct
  source 1..20: mol_type = other RNA
ctgcctgaggacatgcaggc

SEQ ID NO: 12826 - RNA, 20 nt, synthetic construct
  source 1..20: mol_type = other RNA
ctgcggcaagaacattgtgc

SEQ ID NO: 12827 - RNA, 20 nt, synthetic construct
  source 1..20: mol_type = other RNA
ctgctttaagctgcggcaag

SEQ ID NO: 12828 - RNA, 20 nt, synthetic construct
  source 1..20: mol_type = other RNA
ctggggctcacttgataccg

SEQ ID NO: 12829 - RNA, 20 nt, synthetic construct
  source 1..20: mol_type = other RNA
ctggggctcaggccactcga

SEQ ID NO: 12830 - RNA, 20 nt, synthetic construct
  source 1..20: mol_type = other RNA
ctggtcccagggccctgggg

SEQ ID NO: 12831 - RNA, 20 nt, synthetic construct
  source 1..20: mol_type = other RNA
ctgtgcttactttcaacggt

SEQ ID NO: 12832 - RNA, 20 nt, synthetic construct
  source 1..20: mol_type = other RNA
cttactttcaacggtatcaa

SEQ ID NO: 12833 - RNA, 20 nt, synthetic construct
  source 1..20: mol_type = other RNA
cttcgagtggcctgagcccc

SEQ ID NO: 12834 - RNA, 20 nt, synthetic construct
  source 1..20: mol_type = other RNA
cttgataccgttgaaagtaa

SEQ ID NO: 12835 - RNA, 20 nt, synthetic construct
  source 1..20: mol_type = other RNA
cttgccgcagcttaaagcag

SEQ ID NO: 12836 - RNA, 20 nt, synthetic construct
  source 1..20: mol_type = other RNA
ctttaagctgcggcaagaac

SEQ ID NO: 12837 - RNA, 20 nt, synthetic construct
  source 1..20: mol_type = other RNA
ctttcaacggtatcaagtga

SEQ ID NO: 12838 - RNA, 20 nt, synthetic construct
  source 1..20: mol_type = other RNA
gaaagtaagcacagcctgca

SEQ ID NO: 12839 - RNA, 20 nt, synthetic construct
  source 1..20: mol_type = other RNA
gaacattgtgcccatcattg

SEQ ID NO: 12840 - RNA, 20 nt, synthetic construct
  source 1..20: mol_type = other RNA
gaagccatcaatgatgggca

SEQ ID NO: 12841 - RNA, 20 nt, synthetic construct
  source 1..20: mol_type = other RNA
gacatgcaggctgtgcttac

SEQ ID NO: 12842 - RNA, 20 nt, synthetic construct
  source 1..20: mol_type = other RNA
gacctggggctcaggccact

SEQ ID NO: 12843 - RNA, 20 nt, synthetic construct
  source 1..20: mol_type = other RNA
gactgctttaagctgcggca

SEQ ID NO: 12844 - RNA, 20 nt, synthetic construct
  source 1..20: mol_type = other RNA
gagattgtgactgctttaag

SEQ ID NO: 12845 - RNA, 20 nt, synthetic construct
  source 1..20: mol_type = other RNA
gagccccaggtcctgcctga

SEQ ID NO: 12846 - RNA, 20 nt, synthetic construct
  source 1..20: mol_type = other RNA
gaggacatgcaggctgtgct

SEQ ID NO: 12847 - RNA, 20 nt, synthetic construct
  source 1..20: mol_type = other RNA
gagtggcctgagccccaggt

SEQ ID NO: 12848 - RNA, 20 nt, synthetic construct
  source 1..20: mol_type = other RNA
gataccgttgaaagtaagca

SEQ ID NO: 12849 - RNA, 20 nt, synthetic construct
  source 1..20: mol_type = other RNA
gatggcttcgagtggcctga

SEQ ID NO: 12850 - RNA, 20 nt, synthetic construct
  source 1..20: mol_type = other RNA
gatgggcacaatgttcttgc

SEQ ID NO: 12851 - RNA, 20 nt, synthetic construct
  source 1..20: mol_type = other RNA
gattgtgactgctttaagct

SEQ ID NO: 12852 - RNA, 20 nt, synthetic construct
  source 1..20: mol_type = other RNA
gcaagaacattgtgcccatc

SEQ ID NO: 12853 - RNA, 20 nt, synthetic construct
  source 1..20: mol_type = other RNA
gcacaatgttcttgccgcag

SEQ ID NO: 12854 - RNA, 20 nt, synthetic construct
  source 1..20: mol_type = other RNA
gcacagcctgcatgtcctca

SEQ ID NO: 12855 - RNA, 20 nt, synthetic construct
  source 1..20: mol_type = other RNA
gcaggacctggggctcaggc

SEQ ID NO: 12856 - RNA, 20 nt, synthetic construct
  source 1..20: mol_type = other RNA
gcaggctgtgcttactttca

SEQ ID NO: 12857 - RNA, 20 nt, synthetic construct
  source 1..20: mol_type = other RNA
gcatgtcctcaggcaggacc

SEQ ID NO: 12858 - RNA, 20 nt, synthetic construct
  source 1..20: mol_type = other RNA
gccactcgaagccatcaatg

SEQ ID NO: 12859 - RNA, 20 nt, synthetic construct
  source 1..20: mol_type = other RNA
gccatcaatgatgggcacaa

SEQ ID NO: 12860 - RNA, 20 nt, synthetic construct
  source 1..20: mol_type = other RNA
gcccatcattgatggcttcg

SEQ ID NO: 12861 - RNA, 20 nt, synthetic construct
  source 1..20: mol_type = other RNA
gccccaggtcctgcctgagg

SEQ ID NO: 12862 - RNA, 20 nt, synthetic construct
  source 1..20: mol_type = other RNA
gccctggggctcacttgata

SEQ ID NO: 12863 - RNA, 20 nt, synthetic construct
  source 1..20: mol_type = other RNA
gcctgagccccaggtcctgc

SEQ ID NO: 12864 - RNA, 20 nt, synthetic construct
  source 1..20: mol_type = other RNA
gcctgaggacatgcaggctg

SEQ ID NO: 12865 - RNA, 20 nt, synthetic construct
  source 1..20: mol_type = other RNA
gcctgcatgtcctcaggcag

SEQ ID NO: 12866 - RNA, 20 nt, synthetic construct
  source 1..20: mol_type = other RNA
gcggcaagaacattgtgccc

SEQ ID NO: 12867 - RNA, 20 nt, synthetic construct
  source 1..20: mol_type = other RNA
gctcacttgataccgttgaa

SEQ ID NO: 12868 - RNA, 20 nt, synthetic construct
  source 1..20: mol_type = other RNA
gctcaggccactcgaagcca

SEQ ID NO: 12869 - RNA, 20 nt, synthetic construct
  source 1..20: mol_type = other RNA
gctgcggcaagaacattgtg

SEQ ID NO: 12870 - RNA, 20 nt, synthetic construct
  source 1..20: mol_type = other RNA
gctgtgcttactttcaacgg

SEQ ID NO: 12871 - RNA, 20 nt, synthetic construct
  source 1..20: mol_type = other RNA
gcttactttcaacggtatca

SEQ ID NO: 12872 - RNA, 20 nt, synthetic construct
  source 1..20: mol_type = other RNA
gcttcgagtggcctgagccc

SEQ ID NO: 12873 - RNA, 20 nt, synthetic construct
  source 1..20: mol_type = other RNA
gctttaagctgcggcaagaa

SEQ ID NO: 12874 - RNA, 20 nt, synthetic construct
  source 1..20: mol_type = other RNA
ggacatgcaggctgtgctta

SEQ ID NO: 12875 - RNA, 20 nt, synthetic construct
  source 1..20: mol_type = other RNA
ggacctggggctcaggccac

SEQ ID NO: 12876 - RNA, 20 nt, synthetic construct
  source 1..20: mol_type = other RNA
ggcaagaacattgtgcccat

SEQ ID NO: 12877 - RNA, 20 nt, synthetic construct
  source 1..20: mol_type = other RNA
ggcacaatgttcttgccgca

SEQ ID NO: 12878 - RNA, 20 nt, synthetic construct
  source 1..20: mol_type = other RNA
ggcaggacctggggctcagg

SEQ ID NO: 12879 - RNA, 20 nt, synthetic construct
  source 1..20: mol_type = other RNA
ggccactcgaagccatcaat

SEQ ID NO: 12880 - RNA, 20 nt, synthetic construct
  source 1..20: mol_type = other RNA
ggccctggggctcacttgat

SEQ ID NO: 12881 - RNA, 20 nt, synthetic construct
  source 1..20: mol_type = other RNA
ggcctgagccccaggtcctg

SEQ ID NO: 12882 - RNA, 20 nt, synthetic construct
  source 1..20: mol_type = other RNA
ggctcacttgataccgttga

SEQ ID NO: 12883 - RNA, 20 nt, synthetic construct
  source 1..20: mol_type = other RNA
ggctcaggccactcgaagcc

SEQ ID NO: 12884 - RNA, 20 nt, synthetic construct
  source 1..20: mol_type = other RNA
ggctgtgcttactttcaacg

SEQ ID NO: 12885 - RNA, 20 nt, synthetic construct
  source 1..20: mol_type = other RNA
ggcttcgagtggcctgagcc

SEQ ID NO: 12886 - RNA, 20 nt, synthetic construct
  source 1..20: mol_type = other RNA
gggcacaatgttcttgccgc

SEQ ID NO: 12887 - RNA, 20 nt, synthetic construct
  source 1..20: mol_type = other RNA
gggccctggggctcacttga

SEQ ID NO: 12888 - RNA, 20 nt, synthetic construct
  source 1..20: mol_type = other RNA
gggctcacttgataccgttg

SEQ ID NO: 12889 - RNA, 20 nt, synthetic construct
  source 1..20: mol_type = other RNA
gggctcaggccactcgaagc

SEQ ID NO: 12890 - RNA, 20 nt, synthetic construct
  source 1..20: mol_type = other RNA
ggggctcacttgataccgtt

SEQ ID NO: 12891 - RNA, 20 nt, synthetic construct
  source 1..20: mol_type = other RNA
ggggctcaggccactcgaag

SEQ ID NO: 12892 - RNA, 20 nt, synthetic construct
  source 1..20: mol_type = other RNA
ggtatcaagtgagccccagg

SEQ ID NO: 12893 - RNA, 20 nt, synthetic construct
  source 1..20: mol_type = other RNA
ggtcccagggccctggggct

SEQ ID NO: 12894 - RNA, 20 nt, synthetic construct
  source 1..20: mol_type = other RNA
ggtcctgcctgaggacatgc

SEQ ID NO: 12895 - RNA, 20 nt, synthetic construct
  source 1..20: mol_type = other RNA
gtaagcacagcctgcatgtc

SEQ ID NO: 12896 - RNA, 20 nt, synthetic construct
  source 1..20: mol_type = other RNA
gtatcaagtgagccccaggg

SEQ ID NO: 12897 - RNA, 20 nt, synthetic construct
  source 1..20: mol_type = other RNA
gtcccagggccctggggctc

SEQ ID NO: 12898 - RNA, 20 nt, synthetic construct
  source 1..20: mol_type = other RNA
gtcctcaggcaggacctggg

SEQ ID NO: 12899 - RNA, 20 nt, synthetic construct
  source 1..20: mol_type = other RNA
gtcctgcctgaggacatgca

SEQ ID NO: 12900 - RNA, 20 nt, synthetic construct
  source 1..20: mol_type = other RNA
gtgactgctttaagctgcgg

SEQ ID NO: 12901 - RNA, 20 nt, synthetic construct
  source 1..20: mol_type = other RNA
gtgagccccagggccctggg

SEQ ID NO: 12902 - RNA, 20 nt, synthetic construct
  source 1..20: mol_type = other RNA
gtgcccatcattgatggctt

SEQ ID NO: 12903 - RNA, 20 nt, synthetic construct
  source 1..20: mol_type = other RNA
gtgcttactttcaacggtat

SEQ ID NO: 12904 - RNA, 20 nt, synthetic construct
  source 1..20: mol_type = other RNA
gtggcctgagccccaggtcc

SEQ ID NO: 12905 - RNA, 20 nt, synthetic construct
  source 1..20: mol_type = other RNA
gttcttgccgcagcttaaag

SEQ ID NO: 12906 - RNA, 20 nt, synthetic construct
  source 1..20: mol_type = other RNA
gttgaaagtaagcacagcct

SEQ ID NO: 12907 - RNA, 20 nt, synthetic construct
  source 1..20: mol_type = other RNA
taagcacagcctgcatgtcc

SEQ ID NO: 12908 - RNA, 20 nt, synthetic construct
  source 1..20: mol_type = other RNA
taagctgcggcaagaacatt

SEQ ID NO: 12909 - RNA, 20 nt, synthetic construct
  source 1..20: mol_type = other RNA
taccgttgaaagtaagcaca

SEQ ID NO: 12910 - RNA, 20 nt, synthetic construct
  source 1..20: mol_type = other RNA
tactttcaacggtatcaagt

SEQ ID NO: 12911 - RNA, 20 nt, synthetic construct
  source 1..20: mol_type = other RNA
tatcaagtgagccccagggc

SEQ ID NO: 12912 - RNA, 20 nt, synthetic construct
  source 1..20: mol_type = other RNA
tcaacggtatcaagtgagcc

SEQ ID NO: 12913 - RNA, 20 nt, synthetic construct
  source 1..20: mol_type = other RNA
tcaagtgagccccagggccc

SEQ ID NO: 12914 - RNA, 20 nt, synthetic construct
  source 1..20: mol_type = other RNA
tcaatgatgggcacaatgtt

SEQ ID NO: 12915 - RNA, 20 nt, synthetic construct
  source 1..20: mol_type = other RNA
tcacttgataccgttgaaag

SEQ ID NO: 12916 - RNA, 20 nt, synthetic construct
  source 1..20: mol_type = other RNA
tcaggcaggacctggggctc

SEQ ID NO: 12917 - RNA, 20 nt, synthetic construct
  source 1..20: mol_type = other RNA
tcaggccactcgaagccatc

SEQ ID NO: 12918 - RNA, 20 nt, synthetic construct
  source 1..20: mol_type = other RNA
tcattgatggcttcgagtgg

SEQ ID NO: 12919 - RNA, 20 nt, synthetic construct
  source 1..20: mol_type = other RNA
tcccagggccctggggctca

SEQ ID NO: 12920 - RNA, 20 nt, synthetic construct
  source 1..20: mol_type = other RNA
tcctcaggcaggacctgggg

SEQ ID NO: 12921 - RNA, 20 nt, synthetic construct
  source 1..20: mol_type = other RNA
tcctgcctgaggacatgcag

SEQ ID NO: 12922 - RNA, 20 nt, synthetic construct
  source 1..20: mol_type = other RNA
tcgaagccatcaatgatggg

SEQ ID NO: 12923 - RNA, 20 nt, synthetic construct
  source 1..20: mol_type = other RNA
tcgagtggcctgagccccag

SEQ ID NO: 12924 - RNA, 20 nt, synthetic construct
  source 1..20: mol_type = other RNA
tcttgccgcagcttaaagca

SEQ ID NO: 12925 - RNA, 20 nt, synthetic construct
  source 1..20: mol_type = other RNA
tgaaagtaagcacagcctgc

SEQ ID NO: 12926 - RNA, 20 nt, synthetic construct
  source 1..20: mol_type = other RNA
tgactgctttaagctgcggc

SEQ ID NO: 12927 - RNA, 20 nt, synthetic construct
  source 1..20: mol_type = other RNA
tgagccccaggtcctgcctg

SEQ ID NO: 12928 - RNA, 20 nt, synthetic construct
  source 1..20: mol_type = other RNA
tgaggacatgcaggctgtgc

SEQ ID NO: 12929 - RNA, 20 nt, synthetic construct
  source 1..20: mol_type = other RNA
tgataccgttgaaagtaagc

SEQ ID NO: 12930 - RNA, 20 nt, synthetic construct
  source 1..20: mol_type = other RNA
tgatggcttcgagtggcctg

SEQ ID NO: 12931 - RNA, 20 nt, synthetic construct
  source 1..20: mol_type = other RNA
tgatgggcacaatgttcttg

SEQ ID NO: 12932 - RNA, 20 nt, synthetic construct
  source 1..20: mol_type = other RNA
tgcaggctgtgcttactttc

SEQ ID NO: 12933 - RNA, 20 nt, synthetic construct
  source 1..20: mol_type = other RNA
tgcatgtcctcaggcaggac

SEQ ID NO: 12934 - RNA, 20 nt, synthetic construct
  source 1..20: mol_type = other RNA
tgcccatcattgatggcttc

SEQ ID NO: 12935 - RNA, 20 nt, synthetic construct
  source 1..20: mol_type = other RNA
tgccgcagcttaaagcagtc

SEQ ID NO: 12936 - RNA, 20 nt, synthetic construct
  source 1..20: mol_type = other RNA
tgcctgaggacatgcaggct

SEQ ID NO: 12937 - RNA, 20 nt, synthetic construct
  source 1..20: mol_type = other RNA
tgcggcaagaacattgtgcc

SEQ ID NO: 12938 - RNA, 20 nt, synthetic construct
  source 1..20: mol_type = other RNA
tgcttactttcaacggtatc

SEQ ID NO: 12939 - RNA, 20 nt, synthetic construct
  source 1..20: mol_type = other RNA
tgctttaagctgcggcaaga

SEQ ID NO: 12940 - RNA, 20 nt, synthetic construct
  source 1..20: mol_type = other RNA
tggcctgagccccaggtcct

SEQ ID NO: 12941 - RNA, 20 nt, synthetic construct
  source 1..20: mol_type = other RNA
tggcttcgagtggcctgagc

SEQ ID NO: 12942 - RNA, 20 nt, synthetic construct
  source 1..20: mol_type = other RNA
tgggcacaatgttcttgccg

SEQ ID NO: 12943 - RNA, 20 nt, synthetic construct
  source 1..20: mol_type = other RNA
tggggctcacttgataccgt

SEQ ID NO: 12944 - RNA, 20 nt, synthetic construct
  source 1..20: mol_type = other RNA
tggggctcaggccactcgaa

SEQ ID NO: 12945 - RNA, 20 nt, synthetic construct
  source 1..20: mol_type = other RNA
tggtcccagggccctggggc

SEQ ID NO: 12946 - RNA, 20 nt, synthetic construct
  source 1..20: mol_type = other RNA
tgtcctcaggcaggacctgg

SEQ ID NO: 12947 - RNA, 20 nt, synthetic construct
  source 1..20: mol_type = other RNA
tgtgactgctttaagctgcg

SEQ ID NO: 12948 - RNA, 20 nt, synthetic construct
  source 1..20: mol_type = other RNA
tgtgcccatcattgatggct

SEQ ID NO: 12949 - RNA, 20 nt, synthetic construct
  source 1..20: mol_type = other RNA
tgtgcttactttcaacggta

SEQ ID NO: 12950 - RNA, 20 nt, synthetic construct
  source 1..20: mol_type = other RNA
tgttcttgccgcagcttaaa

SEQ ID NO: 12951 - RNA, 20 nt, synthetic construct
  source 1..20: mol_type = other RNA
ttaagctgcggcaagaacat

SEQ ID NO: 12952 - RNA, 20 nt, synthetic construct
  source 1..20: mol_type = other RNA
ttactttcaacggtatcaag

SEQ ID NO: 12953 - RNA, 20 nt, synthetic construct
  source 1..20: mol_type = other RNA
ttcaacggtatcaagtgagc

SEQ ID NO: 12954 - RNA, 20 nt, synthetic construct
  source 1..20: mol_type = other RNA
ttcgagtggcctgagcccca

SEQ ID NO: 12955 - RNA, 20 nt, synthetic construct
  source 1..20: mol_type = other RNA
ttcttgccgcagcttaaagc

SEQ ID NO: 12956 - RNA, 20 nt, synthetic construct
  source 1..20: mol_type = other RNA
ttgaaagtaagcacagcctg

SEQ ID NO: 12957 - RNA, 20 nt, synthetic construct
  source 1..20: mol_type = other RNA
ttgataccgttgaaagtaag

SEQ ID NO: 12958 - RNA, 20 nt, synthetic construct
  source 1..20: mol_type = other RNA
ttgatggcttcgagtggcct

SEQ ID NO: 12959 - RNA, 20 nt, synthetic construct
  source 1..20: mol_type = other RNA
ttgccgcagcttaaagcagt

SEQ ID NO: 12960 - RNA, 20 nt, synthetic construct
  source 1..20: mol_type = other RNA
ttgtgactgctttaagctgc

SEQ ID NO: 12961 - RNA, 20 nt, synthetic construct
  source 1..20: mol_type = other RNA
ttgtgcccatcattgatggc

SEQ ID NO: 12962 - RNA, 20 nt, synthetic construct
  source 1..20: mol_type = other RNA
tttaagctgcggcaagaaca

SEQ ID NO: 12963 - RNA, 20 nt, synthetic construct
  source 1..20: mol_type = other RNA
tttcaacggtatcaagtgag

SEQ ID NO: 12964 - RNA, 21 nt, synthetic construct
  source 1..21: mol_type = other RNA
aaagtaagcacagcctgcatg

SEQ ID NO: 12965 - RNA, 21 nt, synthetic construct
  source 1..21: mol_type = other RNA
aacattgtgcccatcattgat

SEQ ID NO: 12966 - RNA, 21 nt, synthetic construct
  source 1..21: mol_type = other RNA
aacggtatcaagtgagcccca

SEQ ID NO: 12967 - RNA, 21 nt, synthetic construct
  source 1..21: mol_type = other RNA
aagaacattgtgcccatcatt

SEQ ID NO: 12968 - RNA, 21 nt, synthetic construct
  source 1..21: mol_type = other RNA
aagcacagcctgcatgtcctc

SEQ ID NO: 12969 - RNA, 21 nt, synthetic construct
  source 1..21: mol_type = other RNA
aagccatcaatgatgggcaca

SEQ ID NO: 12970 - RNA, 21 nt, synthetic construct
  source 1..21: mol_type = other RNA
aagctgcggcaagaacattgt

SEQ ID NO: 12971 - RNA, 21 nt, synthetic construct
  source 1..21: mol_type = other RNA
aagtaagcacagcctgcatgt

SEQ ID NO: 12972 - RNA, 21 nt, synthetic construct
  source 1..21: mol_type = other RNA
aagtgagccccagggccctgg

SEQ ID NO: 12973 - RNA, 21 nt, synthetic construct
  source 1..21: mol_type = other RNA
aatgatgggcacaatgttctt

SEQ ID NO: 12974 - RNA, 21 nt, synthetic construct
  source 1..21: mol_type = other RNA
aatgttcttgccgcagcttaa

SEQ ID NO: 12975 - RNA, 21 nt, synthetic construct
  source 1..21: mol_type = other RNA
acaatgttcttgccgcagctt

SEQ ID NO: 12976 - RNA, 21 nt, synthetic construct
  source 1..21: mol_type = other RNA
acagcctgcatgtcctcaggc

SEQ ID NO: 12977 - RNA, 21 nt, synthetic construct
  source 1..21: mol_type = other RNA
acatgcaggctgtgcttactt

SEQ ID NO: 12978 - RNA, 21 nt, synthetic construct
  source 1..21: mol_type = other RNA
acattgtgcccatcattgatg

SEQ ID NO: 12979 - RNA, 21 nt, synthetic construct
  source 1..21: mol_type = other RNA
accgttgaaagtaagcacagc

SEQ ID NO: 12980 - RNA, 21 nt, synthetic construct
  source 1..21: mol_type = other RNA
acctggggctcaggccactcg

SEQ ID NO: 12981 - RNA, 21 nt, synthetic construct
  source 1..21: mol_type = other RNA
acggtatcaagtgagccccag

SEQ ID NO: 12982 - RNA, 21 nt, synthetic construct
  source 1..21: mol_type = other RNA
actcgaagccatcaatgatgg

SEQ ID NO: 12983 - RNA, 21 nt, synthetic construct
  source 1..21: mol_type = other RNA
actgctttaagctgcggcaag

SEQ ID NO: 12984 - RNA, 21 nt, synthetic construct
  source 1..21: mol_type = other RNA
acttgataccgttgaaagtaa

SEQ ID NO: 12985 - RNA, 21 nt, synthetic construct
  source 1..21: mol_type = other RNA
actttcaacggtatcaagtga

SEQ ID NO: 12986 - RNA, 21 nt, synthetic construct
  source 1..21: mol_type = other RNA
agaacattgtgcccatcattg

SEQ ID NO: 12987 - RNA, 21 nt, synthetic construct
  source 1..21: mol_type = other RNA
agattgtgactgctttaagct

SEQ ID NO: 12988 - RNA, 21 nt, synthetic construct
  source 1..21: mol_type = other RNA
agcacagcctgcatgtcctca

SEQ ID NO: 12989 - RNA, 21 nt, synthetic construct
  source 1..21: mol_type = other RNA
agccatcaatgatgggcacaa

SEQ ID NO: 12990 - RNA, 21 nt, synthetic construct
  source 1..21: mol_type = other RNA
agccccaggtcctgcctgagg

SEQ ID NO: 12991 - RNA, 21 nt, synthetic construct
  source 1..21: mol_type = other RNA
agcctgcatgtcctcaggcag

SEQ ID NO: 12992 - RNA, 21 nt, synthetic construct
  source 1..21: mol_type = other RNA
agctgcggcaagaacattgtg

SEQ ID NO: 12993 - RNA, 21 nt, synthetic construct
  source 1..21: mol_type = other RNA
aggacatgcaggctgtgctta

SEQ ID NO: 12994 - RNA, 21 nt, synthetic construct
  source 1..21: mol_type = other RNA
aggacctggggctcaggccac

SEQ ID NO: 12995 - RNA, 21 nt, synthetic construct
  source 1..21: mol_type = other RNA
aggcaggacctggggctcagg

SEQ ID NO: 12996 - RNA, 21 nt, synthetic construct
  source 1..21: mol_type = other RNA
aggccactcgaagccatcaat

SEQ ID NO: 12997 - RNA, 21 nt, synthetic construct
  source 1..21: mol_type = other RNA
aggctgtgcttactttcaacg

SEQ ID NO: 12998 - RNA, 21 nt, synthetic construct
  source 1..21: mol_type = other RNA
agggccctggggctcacttga

SEQ ID NO: 12999 - RNA, 21 nt, synthetic construct
  source 1..21: mol_type = other RNA
aggtcctgcctgaggacatgc

SEQ ID NO: 13000 - RNA, 21 nt, synthetic construct
  source 1..21: mol_type = other RNA
agtaagcacagcctgcatgtc

SEQ ID NO: 13001 - RNA, 21 nt, synthetic construct
  source 1..21: mol_type = other RNA
agtgagccccagggccctggg

SEQ ID NO: 13002 - RNA, 21 nt, synthetic construct
  source 1..21: mol_type = other RNA
agtggcctgagccccaggtcc

SEQ ID NO: 13003 - RNA, 21 nt, synthetic construct
  source 1..21: mol_type = other RNA
ataccgttgaaagtaagcaca

SEQ ID NO: 13004 - RNA, 21 nt, synthetic construct
  source 1..21: mol_type = other RNA
atcaagtgagccccagggccc

SEQ ID NO: 13005 - RNA, 21 nt, synthetic construct
  source 1..21: mol_type = other RNA
atcaatgatgggcacaatgtt

SEQ ID NO: 13006 - RNA, 21 nt, synthetic construct
  source 1..21: mol_type = other RNA
atcattgatggcttcgagtgg

SEQ ID NO: 13007 - RNA, 21 nt, synthetic construct
  source 1..21: mol_type = other RNA
atgatgggcacaatgttcttg

SEQ ID NO: 13008 - RNA, 21 nt, synthetic construct
  source 1..21: mol_type = other RNA
atgcaggctgtgcttactttc

SEQ ID NO: 13009 - RNA, 21 nt, synthetic construct
  source 1..21: mol_type = other RNA
atggcttcgagtggcctgagc

SEQ ID NO: 13010 - RNA, 21 nt, synthetic construct
  source 1..21: mol_type = other RNA
atgggcacaatgttcttgccg

SEQ ID NO: 13011 - RNA, 21 nt, synthetic construct
  source 1..21: mol_type = other RNA
atgtcctcaggcaggacctgg

SEQ ID NO: 13012 - RNA, 21 nt, synthetic construct
  source 1..21: mol_type = other RNA
atgttcttgccgcagcttaaa

SEQ ID NO: 13013 - RNA, 21 nt, synthetic construct
  source 1..21: mol_type = other RNA
attgatggcttcgagtggcct

SEQ ID NO: 13014 - RNA, 21 nt, synthetic construct
  source 1..21: mol_type = other RNA
attgtgactgctttaagctgc

SEQ ID NO: 13015 - RNA, 21 nt, synthetic construct
  source 1..21: mol_type = other RNA
attgtgcccatcattgatggc

SEQ ID NO: 13016 - RNA, 21 nt, synthetic construct
  source 1..21: mol_type = other RNA
caacggtatcaagtgagcccc

SEQ ID NO: 13017 - RNA, 21 nt, synthetic construct
  source 1..21: mol_type = other RNA
caagaacattgtgcccatcat

SEQ ID NO: 13018 - RNA, 21 nt, synthetic construct
  source 1..21: mol_type = other RNA
caagtgagccccagggccctg

SEQ ID NO: 13019 - RNA, 21 nt, synthetic construct
  source 1..21: mol_type = other RNA
caatgatgggcacaatgttct

SEQ ID NO: 13020 - RNA, 21 nt, synthetic construct
  source 1..21: mol_type = other RNA
caatgttcttgccgcagctta

SEQ ID NO: 13021 - RNA, 21 nt, synthetic construct
  source 1..21: mol_type = other RNA
cacaatgttcttgccgcagct

SEQ ID NO: 13022 - RNA, 21 nt, synthetic construct
  source 1..21: mol_type = other RNA
cacagcctgcatgtcctcagg

SEQ ID NO: 13023 - RNA, 21 nt, synthetic construct
  source 1..21: mol_type = other RNA
cactcgaagccatcaatgatg

SEQ ID NO: 13024 - RNA, 21 nt, synthetic construct
  source 1..21: mol_type = other RNA
cacttgataccgttgaaagta

SEQ ID NO: 13025 - RNA, 21 nt, synthetic construct
  source 1..21: mol_type = other RNA
cagcctgcatgtcctcaggca

SEQ ID NO: 13026 - RNA, 21 nt, synthetic construct
  source 1..21: mol_type = other RNA
caggacctggggctcaggcca

SEQ ID NO: 13027 - RNA, 21 nt, synthetic construct
  source 1..21: mol_type = other RNA
caggcaggacctggggctcag

SEQ ID NO: 13028 - RNA, 21 nt, synthetic construct
  source 1..21: mol_type = other RNA
caggccactcgaagccatcaa

SEQ ID NO: 13029 - RNA, 21 nt, synthetic construct
  source 1..21: mol_type = other RNA
caggctgtgcttactttcaac

SEQ ID NO: 13030 - RNA, 21 nt, synthetic construct
  source 1..21: mol_type = other RNA
cagggccctggggctcacttg

SEQ ID NO: 13031 - RNA, 21 nt, synthetic construct
  source 1..21: mol_type = other RNA
caggtcctgcctgaggacatg

SEQ ID NO: 13032 - RNA, 21 nt, synthetic construct
  source 1..21: mol_type = other RNA
catcaatgatgggcacaatgt

SEQ ID NO: 13033 - RNA, 21 nt, synthetic construct
  source 1..21: mol_type = other RNA
catcattgatggcttcgagtg

SEQ ID NO: 13034 - RNA, 21 nt, synthetic construct
  source 1..21: mol_type = other RNA
catgcaggctgtgcttacttt

SEQ ID NO: 13035 - RNA, 21 nt, synthetic construct
  source 1..21: mol_type = other RNA
catgtcctcaggcaggacctg

SEQ ID NO: 13036 - RNA, 21 nt, synthetic construct
  source 1..21: mol_type = other RNA
cattgatggcttcgagtggcc

SEQ ID NO: 13037 - RNA, 21 nt, synthetic construct
  source 1..21: mol_type = other RNA
cattgtgcccatcattgatgg

SEQ ID NO: 13038 - RNA, 21 nt, synthetic construct
  source 1..21: mol_type = other RNA
ccactcgaagccatcaatgat

SEQ ID NO: 13039 - RNA, 21 nt, synthetic construct
  source 1..21: mol_type = other RNA
ccagggccctggggctcactt

SEQ ID NO: 13040 - RNA, 21 nt, synthetic construct
  source 1..21: mol_type = other RNA
ccaggtcctgcctgaggacat

SEQ ID NO: 13041 - RNA, 21 nt, synthetic construct
  source 1..21: mol_type = other RNA
ccatcaatgatgggcacaatg

SEQ ID NO: 13042 - RNA, 21 nt, synthetic construct
  source 1..21: mol_type = other RNA
ccatcattgatggcttcgagt

SEQ ID NO: 13043 - RNA, 21 nt, synthetic construct
  source 1..21: mol_type = other RNA
cccagggccctggggctcact

SEQ ID NO: 13044 - RNA, 21 nt, synthetic construct
  source 1..21: mol_type = other RNA
cccaggtcctgcctgaggaca

SEQ ID NO: 13045 - RNA, 21 nt, synthetic construct
  source 1..21: mol_type = other RNA
cccatcattgatggcttcgag

SEQ ID NO: 13046 - RNA, 21 nt, synthetic construct
  source 1..21: mol_type = other RNA
ccccaggtcctgcctgaggac

SEQ ID NO: 13047 - RNA, 21 nt, synthetic construct
  source 1..21: mol_type = other RNA
ccccctggtcccagggccctg

SEQ ID NO: 13048 - RNA, 21 nt, synthetic construct
  source 1..21: mol_type = other RNA
cccctggtcccagggccctgg

SEQ ID NO: 13049 - RNA, 21 nt, synthetic construct
  source 1..21: mol_type = other RNA
ccctggggctcacttgatacc

SEQ ID NO: 13050 - RNA, 21 nt, synthetic construct
  source 1..21: mol_type = other RNA
ccctggtcccagggccctggg

SEQ ID NO: 13051 - RNA, 21 nt, synthetic construct
  source 1..21: mol_type = other RNA
ccgttgaaagtaagcacagcc

SEQ ID NO: 13052 - RNA, 21 nt, synthetic construct
  source 1..21: mol_type = other RNA
cctcaggcaggacctggggct

SEQ ID NO: 13053 - RNA, 21 nt, synthetic construct
  source 1..21: mol_type = other RNA
cctgagccccaggtcctgcct

SEQ ID NO: 13054 - RNA, 21 nt, synthetic construct
  source 1..21: mol_type = other RNA
cctgaggacatgcaggctgtg

SEQ ID NO: 13055 - RNA, 21 nt, synthetic construct
  source 1..21: mol_type = other RNA
cctgcatgtcctcaggcagga

SEQ ID NO: 13056 - RNA, 21 nt, synthetic construct
  source 1..21: mol_type = other RNA
cctgcctgaggacatgcaggc

SEQ ID NO: 13057 - RNA, 21 nt, synthetic construct
  source 1..21: mol_type = other RNA
cctggggctcacttgataccg

SEQ ID NO: 13058 - RNA, 21 nt, synthetic construct
  source 1..21: mol_type = other RNA
cctggggctcaggccactcga

SEQ ID NO: 13059 - RNA, 21 nt, synthetic construct
  source 1..21: mol_type = other RNA
cctggtcccagggccctgggg

SEQ ID NO: 13060 - RNA, 21 nt, synthetic construct
  source 1..21: mol_type = other RNA
cgaagccatcaatgatgggca

SEQ ID NO: 13061 - RNA, 21 nt, synthetic construct
  source 1..21: mol_type = other RNA
cgagtggcctgagccccaggt

SEQ ID NO: 13062 - RNA, 21 nt, synthetic construct
  source 1..21: mol_type = other RNA
cggcaagaacattgtgcccat

SEQ ID NO: 13063 - RNA, 21 nt, synthetic construct
  source 1..21: mol_type = other RNA
cggtatcaagtgagccccagg

SEQ ID NO: 13064 - RNA, 21 nt, synthetic construct
  source 1..21: mol_type = other RNA
cgttgaaagtaagcacagcct

SEQ ID NO: 13065 - RNA, 21 nt, synthetic construct
  source 1..21: mol_type = other RNA
ctcacttgataccgttgaaag

SEQ ID NO: 13066 - RNA, 21 nt, synthetic construct
  source 1..21: mol_type = other RNA
ctcaggcaggacctggggctc

SEQ ID NO: 13067 - RNA, 21 nt, synthetic construct
  source 1..21: mol_type = other RNA
ctcaggccactcgaagccatc

SEQ ID NO: 13068 - RNA, 21 nt, synthetic construct
  source 1..21: mol_type = other RNA
ctcgaagccatcaatgatggg

SEQ ID NO: 13069 - RNA, 21 nt, synthetic construct
  source 1..21: mol_type = other RNA
ctgagccccaggtcctgcctg

SEQ ID NO: 13070 - RNA, 21 nt, synthetic construct
  source 1..21: mol_type = other RNA
ctgaggacatgcaggctgtgc

SEQ ID NO: 13071 - RNA, 21 nt, synthetic construct
  source 1..21: mol_type = other RNA
ctgcatgtcctcaggcaggac

SEQ ID NO: 13072 - RNA, 21 nt, synthetic construct
  source 1..21: mol_type = other RNA
ctgcctgaggacatgcaggct

SEQ ID NO: 13073 - RNA, 21 nt, synthetic construct
  source 1..21: mol_type = other RNA
ctgcggcaagaacattgtgcc

SEQ ID NO: 13074 - RNA, 21 nt, synthetic construct
  source 1..21: mol_type = other RNA
ctgctttaagctgcggcaaga

SEQ ID NO: 13075 - RNA, 21 nt, synthetic construct
  source 1..21: mol_type = other RNA
ctggggctcacttgataccgt

SEQ ID NO: 13076 - RNA, 21 nt, synthetic construct
  source 1..21: mol_type = other RNA
ctggggctcaggccactcgaa

SEQ ID NO: 13077 - RNA, 21 nt, synthetic construct
  source 1..21: mol_type = other RNA
ctggtcccagggccctggggc

SEQ ID NO: 13078 - RNA, 21 nt, synthetic construct
  source 1..21: mol_type = other RNA
ctgtgcttactttcaacggta

SEQ ID NO: 13079 - RNA, 21 nt, synthetic construct
  source 1..21: mol_type = other RNA
cttactttcaacggtatcaag

SEQ ID NO: 13080 - RNA, 21 nt, synthetic construct
  source 1..21: mol_type = other RNA
cttcgagtggcctgagcccca

SEQ ID NO: 13081 - RNA, 21 nt, synthetic construct
  source 1..21: mol_type = other RNA
cttgataccgttgaaagtaag

SEQ ID NO: 13082 - RNA, 21 nt, synthetic construct
  source 1..21: mol_type = other RNA
cttgccgcagcttaaagcagt

SEQ ID NO: 13083 - RNA, 21 nt, synthetic construct
  source 1..21: mol_type = other RNA
ctttaagctgcggcaagaaca

SEQ ID NO: 13084 - RNA, 21 nt, synthetic construct
  source 1..21: mol_type = other RNA
ctttcaacggtatcaagtgag

SEQ ID NO: 13085 - RNA, 21 nt, synthetic construct
  source 1..21: mol_type = other RNA
gaaagtaagcacagcctgcat

SEQ ID NO: 13086 - RNA, 21 nt, synthetic construct
  source 1..21: mol_type = other RNA
gaacattgtgcccatcattga

SEQ ID NO: 13087 - RNA, 21 nt, synthetic construct
  source 1..21: mol_type = other RNA
gaagccatcaatgatgggcac

SEQ ID NO: 13088 - RNA, 21 nt, synthetic construct
  source 1..21: mol_type = other RNA
gacatgcaggctgtgcttact

SEQ ID NO: 13089 - RNA, 21 nt, synthetic construct
  source 1..21: mol_type = other RNA
gacctggggctcaggccactc

SEQ ID NO: 13090 - RNA, 21 nt, synthetic construct
  source 1..21: mol_type = other RNA
gactgctttaagctgcggcaa

SEQ ID NO: 13091 - RNA, 21 nt, synthetic construct
  source 1..21: mol_type = other RNA
gagattgtgactgctttaagc

SEQ ID NO: 13092 - RNA, 21 nt, synthetic construct
  source 1..21: mol_type = other RNA
gagccccaggtcctgcctgag

SEQ ID NO: 13093 - RNA, 21 nt, synthetic construct
  source 1..21: mol_type = other RNA
gaggacatgcaggctgtgctt

SEQ ID NO: 13094 - RNA, 21 nt, synthetic construct
  source 1..21: mol_type = other RNA
gagtggcctgagccccaggtc

SEQ ID NO: 13095 - RNA, 21 nt, synthetic construct
  source 1..21: mol_type = other RNA
gataccgttgaaagtaagcac

SEQ ID NO: 13096 - RNA, 21 nt, synthetic construct
  source 1..21: mol_type = other RNA
gatggcttcgagtggcctgag

SEQ ID NO: 13097 - RNA, 21 nt, synthetic construct
  source 1..21: mol_type = other RNA
gatgggcacaatgttcttgcc

SEQ ID NO: 13098 - RNA, 21 nt, synthetic construct
  source 1..21: mol_type = other RNA
gattgtgactgctttaagctg

SEQ ID NO: 13099 - RNA, 21 nt, synthetic construct
  source 1..21: mol_type = other RNA
gcaagaacattgtgcccatca

SEQ ID NO: 13100 - RNA, 21 nt, synthetic construct
  source 1..21: mol_type = other RNA
gcacaatgttcttgccgcagc

SEQ ID NO: 13101 - RNA, 21 nt, synthetic construct
  source 1..21: mol_type = other RNA
gcacagcctgcatgtcctcag

SEQ ID NO: 13102 - RNA, 21 nt, synthetic construct
  source 1..21: mol_type = other RNA
gcaggacctggggctcaggcc

SEQ ID NO: 13103 - RNA, 21 nt, synthetic construct
  source 1..21: mol_type = other RNA
gcaggctgtgcttactttcaa

SEQ ID NO: 13104 - RNA, 21 nt, synthetic construct
  source 1..21: mol_type = other RNA
gcatgtcctcaggcaggacct

SEQ ID NO: 13105 - RNA, 21 nt, synthetic construct
  source 1..21: mol_type = other RNA
gccactcgaagccatcaatga

SEQ ID NO: 13106 - RNA, 21 nt, synthetic construct
  source 1..21: mol_type = other RNA
gccatcaatgatgggcacaat

SEQ ID NO: 13107 - RNA, 21 nt, synthetic construct
  source 1..21: mol_type = other RNA
gcccatcattgatggcttcga

SEQ ID NO: 13108 - RNA, 21 nt, synthetic construct
  source 1..21: mol_type = other RNA
gccccaggtcctgcctgagga

SEQ ID NO: 13109 - RNA, 21 nt, synthetic construct
  source 1..21: mol_type = other RNA
gccctggggctcacttgatac

SEQ ID NO: 13110 - RNA, 21 nt, synthetic construct
  source 1..21: mol_type = other RNA
gcctgagccccaggtcctgcc

SEQ ID NO: 13111 - RNA, 21 nt, synthetic construct
  source 1..21: mol_type = other RNA
gcctgaggacatgcaggctgt

SEQ ID NO: 13112 - RNA, 21 nt, synthetic construct
  source 1..21: mol_type = other RNA
gcctgcatgtcctcaggcagg

SEQ ID NO: 13113 - RNA, 21 nt, synthetic construct
  source 1..21: mol_type = other RNA
gcggcaagaacattgtgccca

SEQ ID NO: 13114 - RNA, 21 nt, synthetic construct
  source 1..21: mol_type = other RNA
gctcacttgataccgttgaaa

SEQ ID NO: 13115 - RNA, 21 nt, synthetic construct
  source 1..21: mol_type = other RNA
gctcaggccactcgaagccat

SEQ ID NO: 13116 - RNA, 21 nt, synthetic construct
  source 1..21: mol_type = other RNA
gctgcggcaagaacattgtgc

SEQ ID NO: 13117 - RNA, 21 nt, synthetic construct
  source 1..21: mol_type = other RNA
gctgtgcttactttcaacggt

SEQ ID NO: 13118 - RNA, 21 nt, synthetic construct
  source 1..21: mol_type = other RNA
gcttactttcaacggtatcaa

SEQ ID NO: 13119 - RNA, 21 nt, synthetic construct
  source 1..21: mol_type = other RNA
gcttcgagtggcctgagcccc

SEQ ID NO: 13120 - RNA, 21 nt, synthetic construct
  source 1..21: mol_type = other RNA
gctttaagctgcggcaagaac

SEQ ID NO: 13121 - RNA, 21 nt, synthetic construct
  source 1..21: mol_type = other RNA
ggacatgcaggctgtgcttac

SEQ ID NO: 13122 - RNA, 21 nt, synthetic construct
  source 1..21: mol_type = other RNA
ggacctggggctcaggccact

SEQ ID NO: 13123 - RNA, 21 nt, synthetic construct
  source 1..21: mol_type = other RNA
ggcaagaacattgtgcccatc

SEQ ID NO: 13124 - RNA, 21 nt, synthetic construct
  source 1..21: mol_type = other RNA
ggcacaatgttcttgccgcag

SEQ ID NO: 13125 - RNA, 21 nt, synthetic construct
  source 1..21: mol_type = other RNA
ggcaggacctggggctcaggc

SEQ ID NO: 13126 - RNA, 21 nt, synthetic construct
  source 1..21: mol_type = other RNA
ggccactcgaagccatcaatg

SEQ ID NO: 13127 - RNA, 21 nt, synthetic construct
  source 1..21: mol_type = other RNA
ggccctggggctcacttgata

SEQ ID NO: 13128 - RNA, 21 nt, synthetic construct
  source 1..21: mol_type = other RNA
ggcctgagccccaggtcctgc

SEQ ID NO: 13129 - RNA, 21 nt, synthetic construct
  source 1..21: mol_type = other RNA
ggctcacttgataccgttgaa

SEQ ID NO: 13130 - RNA, 21 nt, synthetic construct
  source 1..21: mol_type = other RNA
ggctcaggccactcgaagcca

SEQ ID NO: 13131 - RNA, 21 nt, synthetic construct
  source 1..21: mol_type = other RNA
ggctgtgcttactttcaacgg

SEQ ID NO: 13132 - RNA, 21 nt, synthetic construct
  source 1..21: mol_type = other RNA
ggcttcgagtggcctgagccc

SEQ ID NO: 13133 - RNA, 21 nt, synthetic construct
  source 1..21: mol_type = other RNA
gggcacaatgttcttgccgca

SEQ ID NO: 13134 - RNA, 21 nt, synthetic construct
  source 1..21: mol_type = other RNA
gggccctggggctcacttgat

SEQ ID NO: 13135 - RNA, 21 nt, synthetic construct
  source 1..21: mol_type = other RNA
gggctcacttgataccgttga

SEQ ID NO: 13136 - RNA, 21 nt, synthetic construct
  source 1..21: mol_type = other RNA
gggctcaggccactcgaagcc

SEQ ID NO: 13137 - RNA, 21 nt, synthetic construct
  source 1..21: mol_type = other RNA
ggggctcacttgataccgttg

SEQ ID NO: 13138 - RNA, 21 nt, synthetic construct
  source 1..21: mol_type = other RNA
ggggctcaggccactcgaagc

SEQ ID NO: 13139 - RNA, 21 nt, synthetic construct
  source 1..21: mol_type = other RNA
ggtatcaagtgagccccaggg

SEQ ID NO: 13140 - RNA, 21 nt, synthetic construct
  source 1..21: mol_type = other RNA
ggtcccagggccctggggctc

SEQ ID NO: 13141 - RNA, 21 nt, synthetic construct
  source 1..21: mol_type = other RNA
ggtcctgcctgaggacatgca

SEQ ID NO: 13142 - RNA, 21 nt, synthetic construct
  source 1..21: mol_type = other RNA
gtaagcacagcctgcatgtcc

SEQ ID NO: 13143 - RNA, 21 nt, synthetic construct
  source 1..21: mol_type = other RNA
gtatcaagtgagccccagggc

SEQ ID NO: 13144 - RNA, 21 nt, synthetic construct
  source 1..21: mol_type = other RNA
gtcccagggccctggggctca

SEQ ID NO: 13145 - RNA, 21 nt, synthetic construct
  source 1..21: mol_type = other RNA
gtcctcaggcaggacctgggg

SEQ ID NO: 13146 - RNA, 21 nt, synthetic construct
  source 1..21: mol_type = other RNA
gtcctgcctgaggacatgcag

SEQ ID NO: 13147 - RNA, 21 nt, synthetic construct
  source 1..21: mol_type = other RNA
gtgactgctttaagctgcggc

SEQ ID NO: 13148 - RNA, 21 nt, synthetic construct
  source 1..21: mol_type = other RNA
gtgagccccagggccctggga

SEQ ID NO: 13149 - RNA, 21 nt, synthetic construct
  source 1..21: mol_type = other RNA
gtgcccatcattgatggcttc

SEQ ID NO: 13150 - RNA, 21 nt, synthetic construct
  source 1..21: mol_type = other RNA
gtgcttactttcaacggtatc

SEQ ID NO: 13151 - RNA, 21 nt, synthetic construct
  source 1..21: mol_type = other RNA
gtggcctgagccccaggtcct

SEQ ID NO: 13152 - RNA, 21 nt, synthetic construct
  source 1..21: mol_type = other RNA
gttcttgccgcagcttaaagc

SEQ ID NO: 13153 - RNA, 21 nt, synthetic construct
  source 1..21: mol_type = other RNA
gttgaaagtaagcacagcctg

SEQ ID NO: 13154 - RNA, 21 nt, synthetic construct
  source 1..21: mol_type = other RNA
taagcacagcctgcatgtcct

SEQ ID NO: 13155 - RNA, 21 nt, synthetic construct
  source 1..21: mol_type = other RNA
taagctgcggcaagaacattg

SEQ ID NO: 13156 - RNA, 21 nt, synthetic construct
  source 1..21: mol_type = other RNA
taccgttgaaagtaagcacag

SEQ ID NO: 13157 - RNA, 21 nt, synthetic construct
  source 1..21: mol_type = other RNA
tactttcaacggtatcaagtg

SEQ ID NO: 13158 - RNA, 21 nt, synthetic construct
  source 1..21: mol_type = other RNA
tatcaagtgagccccagggcc

SEQ ID NO: 13159 - RNA, 21 nt, synthetic construct
  source 1..21: mol_type = other RNA
tcaacggtatcaagtgagccc

SEQ ID NO: 13160 - RNA, 21 nt, synthetic construct
  source 1..21: mol_type = other RNA
tcaagtgagccccagggccct

SEQ ID NO: 13161 - RNA, 21 nt, synthetic construct
  source 1..21: mol_type = other RNA
tcaatgatgggcacaatgttc

SEQ ID NO: 13162 - RNA, 21 nt, synthetic construct
  source 1..21: mol_type = other RNA
tcacttgataccgttgaaagt

SEQ ID NO: 13163 - RNA, 21 nt, synthetic construct
  source 1..21: mol_type = other RNA
tcaggcaggacctggggctca

SEQ ID NO: 13164 - RNA, 21 nt, synthetic construct
  source 1..21: mol_type = other RNA
tcaggccactcgaagccatca

SEQ ID NO: 13165 - RNA, 21 nt, synthetic construct
  source 1..21: mol_type = other RNA
tcattgatggcttcgagtggc

SEQ ID NO: 13166 - RNA, 21 nt, synthetic construct
  source 1..21: mol_type = other RNA
tcccagggccctggggctcac

SEQ ID NO: 13167 - RNA, 21 nt, synthetic construct
  source 1..21: mol_type = other RNA
tcctcaggcaggacctggggc

SEQ ID NO: 13168 - RNA, 21 nt, synthetic construct
  source 1..21: mol_type = other RNA
tcctgcctgaggacatgcagg

SEQ ID NO: 13169 - RNA, 21 nt, synthetic construct
  source 1..21: mol_type = other RNA
tcgaagccatcaatgatgggc

SEQ ID NO: 13170 - RNA, 21 nt, synthetic construct
  source 1..21: mol_type = other RNA
tcgagtggcctgagccccagg

SEQ ID NO: 13171 - RNA, 21 nt, synthetic construct
  source 1..21: mol_type = other RNA
tcttgccgcagcttaaagcag

SEQ ID NO: 13172 - RNA, 21 nt, synthetic construct
  source 1..21: mol_type = other RNA
tgaaagtaagcacagcctgca

SEQ ID NO: 13173 - RNA, 21 nt, synthetic construct
  source 1..21: mol_type = other RNA
tgactgctttaagctgcggca

SEQ ID NO: 13174 - RNA, 21 nt, synthetic construct
  source 1..21: mol_type = other RNA
tgagccccaggtcctgcctga

SEQ ID NO: 13175 - RNA, 21 nt, synthetic construct
  source 1..21: mol_type = other RNA
tgaggacatgcaggctgtgct

SEQ ID NO: 13176 - RNA, 21 nt, synthetic construct
  source 1..21: mol_type = other RNA
tgataccgttgaaagtaagca

SEQ ID NO: 13177 - RNA, 21 nt, synthetic construct
  source 1..21: mol_type = other RNA
tgatggcttcgagtggcctga

SEQ ID NO: 13178 - RNA, 21 nt, synthetic construct
  source 1..21: mol_type = other RNA
tgatgggcacaatgttcttgc

SEQ ID NO: 13179 - RNA, 21 nt, synthetic construct
  source 1..21: mol_type = other RNA
tgcaggctgtgcttactttca

SEQ ID NO: 13180 - RNA, 21 nt, synthetic construct
  source 1..21: mol_type = other RNA
tgcatgtcctcaggcaggacc

SEQ ID NO: 13181 - RNA, 21 nt, synthetic construct
  source 1..21: mol_type = other RNA
tgcccatcattgatggcttcg

SEQ ID NO: 13182 - RNA, 21 nt, synthetic construct
  source 1..21: mol_type = other RNA
tgcctgaggacatgcaggctg

SEQ ID NO: 13183 - RNA, 21 nt, synthetic construct
  source 1..21: mol_type = other RNA
tgcggcaagaacattgtgccc

SEQ ID NO: 13184 - RNA, 21 nt, synthetic construct
  source 1..21: mol_type = other RNA
tgcttactttcaacggtatca

SEQ ID NO: 13185 - RNA, 21 nt, synthetic construct
  source 1..21: mol_type = other RNA
tgctttaagctgcggcaagaa

SEQ ID NO: 13186 - RNA, 21 nt, synthetic construct
  source 1..21: mol_type = other RNA
tggcctgagccccaggtcctg

SEQ ID NO: 13187 - RNA, 21 nt, synthetic construct
  source 1..21: mol_type = other RNA
tggcttcgagtggcctgagcc

SEQ ID NO: 13188 - RNA, 21 nt, synthetic construct
  source 1..21: mol_type = other RNA
tgggcacaatgttcttgccgc

SEQ ID NO: 13189 - RNA, 21 nt, synthetic construct
  source 1..21: mol_type = other RNA
tggggctcacttgataccgtt

SEQ ID NO: 13190 - RNA, 21 nt, synthetic construct
  source 1..21: mol_type = other RNA
tggggctcaggccactcgaag

SEQ ID NO: 13191 - RNA, 21 nt, synthetic construct
  source 1..21: mol_type = other RNA
tggtcccagggccctggggct

SEQ ID NO: 13192 - RNA, 21 nt, synthetic construct
  source 1..21: mol_type = other RNA
tgtcctcaggcaggacctggg

SEQ ID NO: 13193 - RNA, 21 nt, synthetic construct
  source 1..21: mol_type = other RNA
tgtgactgctttaagctgcgg

SEQ ID NO: 13194 - RNA, 21 nt, synthetic construct
  source 1..21: mol_type = other RNA
tgtgcccatcattgatggctt

SEQ ID NO: 13195 - RNA, 21 nt, synthetic construct
  source 1..21: mol_type = other RNA
tgtgcttactttcaacggtat

SEQ ID NO: 13196 - RNA, 21 nt, synthetic construct
  source 1..21: mol_type = other RNA
tgttcttgccgcagcttaaag

SEQ ID NO: 13197 - RNA, 21 nt, synthetic construct
  source 1..21: mol_type = other RNA
ttaagctgcggcaagaacatt

SEQ ID NO: 13198 - RNA, 21 nt, synthetic construct
  source 1..21: mol_type = other RNA
ttactttcaacggtatcaagt

SEQ ID NO: 13199 - RNA, 21 nt, synthetic construct
  source 1..21: mol_type = other RNA
ttcaacggtatcaagtgagcc

SEQ ID NO: 13200 - RNA, 21 nt, synthetic construct
  source 1..21: mol_type = other RNA
ttcgagtggcctgagccccag

SEQ ID NO: 13201 - RNA, 21 nt, synthetic construct
  source 1..21: mol_type = other RNA
ttcttgccgcagcttaaagca

SEQ ID NO: 13202 - RNA, 21 nt, synthetic construct
  source 1..21: mol_type = other RNA
ttgaaagtaagcacagcctgc

SEQ ID NO: 13203 - RNA, 21 nt, synthetic construct
  source 1..21: mol_type = other RNA
ttgataccgttgaaagtaagc

SEQ ID NO: 13204 - RNA, 21 nt, synthetic construct
  source 1..21: mol_type = other RNA
ttgatggcttcgagtggcctg

SEQ ID NO: 13205 - RNA, 21 nt, synthetic construct
  source 1..21: mol_type = other RNA
ttgccgcagcttaaagcagtc

SEQ ID NO: 13206 - RNA, 21 nt, synthetic construct
  source 1..21: mol_type = other RNA
ttgtgactgctttaagctgcg

SEQ ID NO: 13207 - RNA, 21 nt, synthetic construct
  source 1..21: mol_type = other RNA
ttgtgcccatcattgatggct

SEQ ID NO: 13208 - RNA, 21 nt, synthetic construct
  source 1..21: mol_type = other RNA
tttaagctgcggcaagaacat

SEQ ID NO: 13209 - RNA, 21 nt, synthetic construct
  source 1..21: mol_type = other RNA
tttcaacggtatcaagtgagc

SEQ ID NO: 13210 - RNA, 22 nt, synthetic construct
  source 1..22: mol_type = other RNA
aaagtaagcacagcctgcatgt

SEQ ID NO: 13211 - RNA, 22 nt, synthetic construct
  source 1..22: mol_type = other RNA
aacattgtgcccatcattgatg

SEQ ID NO: 13212 - RNA, 22 nt, synthetic construct
  source 1..22: mol_type = other RNA
aacggtatcaagtgagccccag

SEQ ID NO: 13213 - RNA, 22 nt, synthetic construct
  source 1..22: mol_type = other RNA
aagaacattgtgcccatcattg

SEQ ID NO: 13214 - RNA, 22 nt, synthetic construct
  source 1..22: mol_type = other RNA
aagcacagcctgcatgtcctca

SEQ ID NO: 13215 - RNA, 22 nt, synthetic construct
  source 1..22: mol_type = other RNA
aagccatcaatgatgggcacaa

SEQ ID NO: 13216 - RNA, 22 nt, synthetic construct
  source 1..22: mol_type = other RNA
aagctgcggcaagaacattgtg

SEQ ID NO: 13217 - RNA, 22 nt, synthetic construct
  source 1..22: mol_type = other RNA
aagtaagcacagcctgcatgtc

SEQ ID NO: 13218 - RNA, 22 nt, synthetic construct
  source 1..22: mol_type = other RNA
aagtgagccccagggccctggg

SEQ ID NO: 13219 - RNA, 22 nt, synthetic construct
  source 1..22: mol_type = other RNA
aatgatgggcacaatgttcttg

SEQ ID NO: 13220 - RNA, 22 nt, synthetic construct
  source 1..22: mol_type = other RNA
aatgttcttgccgcagcttaaa

SEQ ID NO: 13221 - RNA, 22 nt, synthetic construct
  source 1..22: mol_type = other RNA
acaatgttcttgccgcagctta

SEQ ID NO: 13222 - RNA, 22 nt, synthetic construct
  source 1..22: mol_type = other RNA
acagcctgcatgtcctcaggca

SEQ ID NO: 13223 - RNA, 22 nt, synthetic construct
  source 1..22: mol_type = other RNA
acatgcaggctgtgcttacttt

SEQ ID NO: 13224 - RNA, 22 nt, synthetic construct
  source 1..22: mol_type = other RNA
acattgtgcccatcattgatgg

SEQ ID NO: 13225 - RNA, 22 nt, synthetic construct
  source 1..22: mol_type = other RNA
accgttgaaagtaagcacagcc

SEQ ID NO: 13226 - RNA, 22 nt, synthetic construct
  source 1..22: mol_type = other RNA
acctggggctcaggccactcga

SEQ ID NO: 13227 - RNA, 22 nt, synthetic construct
  source 1..22: mol_type = other RNA
acggtatcaagtgagccccagg

SEQ ID NO: 13228 - RNA, 22 nt, synthetic construct
  source 1..22: mol_type = other RNA
actcgaagccatcaatgatggg

SEQ ID NO: 13229 - RNA, 22 nt, synthetic construct
  source 1..22: mol_type = other RNA
actgctttaagctgcggcaaga

SEQ ID NO: 13230 - RNA, 22 nt, synthetic construct
  source 1..22: mol_type = other RNA
acttgataccgttgaaagtaag

SEQ ID NO: 13231 - RNA, 22 nt, synthetic construct
  source 1..22: mol_type = other RNA
actttcaacggtatcaagtgag

SEQ ID NO: 13232 - RNA, 22 nt, synthetic construct
  source 1..22: mol_type = other RNA
agaacattgtgcccatcattga

SEQ ID NO: 13233 - RNA, 22 nt, synthetic construct
  source 1..22: mol_type = other RNA
agattgtgactgctttaagctg

SEQ ID NO: 13234 - RNA, 22 nt, synthetic construct
  source 1..22: mol_type = other RNA
agcacagcctgcatgtcctcag

SEQ ID NO: 13235 - RNA, 22 nt, synthetic construct
  source 1..22: mol_type = other RNA
agccatcaatgatgggcacaat

SEQ ID NO: 13236 - RNA, 22 nt, synthetic construct
  source 1..22: mol_type = other RNA
agccccaggtcctgcctgagga

SEQ ID NO: 13237 - RNA, 22 nt, synthetic construct
  source 1..22: mol_type = other RNA
agcctgcatgtcctcaggcagg

SEQ ID NO: 13238 - RNA, 22 nt, synthetic construct
  source 1..22: mol_type = other RNA
agctgcggcaagaacattgtgc

SEQ ID NO: 13239 - RNA, 22 nt, synthetic construct
  source 1..22: mol_type = other RNA
aggacatgcaggctgtgcttac

SEQ ID NO: 13240 - RNA, 22 nt, synthetic construct
  source 1..22: mol_type = other RNA
aggacctggggctcaggccact

SEQ ID NO: 13241 - RNA, 22 nt, synthetic construct
  source 1..22: mol_type = other RNA
aggcaggacctggggctcaggc

SEQ ID NO: 13242 - RNA, 22 nt, synthetic construct
  source 1..22: mol_type = other RNA
aggccactcgaagccatcaatg

SEQ ID NO: 13243 - RNA, 22 nt, synthetic construct
  source 1..22: mol_type = other RNA
aggctgtgcttactttcaacgg

SEQ ID NO: 13244 - RNA, 22 nt, synthetic construct
  source 1..22: mol_type = other RNA
agggccctggggctcacttgat

SEQ ID NO: 13245 - RNA, 22 nt, synthetic construct
  source 1..22: mol_type = other RNA
aggtcctgcctgaggacatgca

SEQ ID NO: 13246 - RNA, 22 nt, synthetic construct
  source 1..22: mol_type = other RNA
agtaagcacagcctgcatgtcc

SEQ ID NO: 13247 - RNA, 22 nt, synthetic construct
  source 1..22: mol_type = other RNA
agtgagccccagggccctggga

SEQ ID NO: 13248 - RNA, 22 nt, synthetic construct
  source 1..22: mol_type = other RNA
agtggcctgagccccaggtcct

SEQ ID NO: 13249 - RNA, 22 nt, synthetic construct
  source 1..22: mol_type = other RNA
ataccgttgaaagtaagcacag

SEQ ID NO: 13250 - RNA, 22 nt, synthetic construct
  source 1..22: mol_type = other RNA
atcaagtgagccccagggccct

SEQ ID NO: 13251 - RNA, 22 nt, synthetic construct
  source 1..22: mol_type = other RNA
atcaatgatgggcacaatgttc

SEQ ID NO: 13252 - RNA, 22 nt, synthetic construct
  source 1..22: mol_type = other RNA
atcattgatggcttcgagtggc

SEQ ID NO: 13253 - RNA, 22 nt, synthetic construct
  source 1..22: mol_type = other RNA
atgatgggcacaatgttcttgc

SEQ ID NO: 13254 - RNA, 22 nt, synthetic construct
  source 1..22: mol_type = other RNA
atgcaggctgtgcttactttca

SEQ ID NO: 13255 - RNA, 22 nt, synthetic construct
  source 1..22: mol_type = other RNA
atggcttcgagtggcctgagcc

SEQ ID NO: 13256 - RNA, 22 nt, synthetic construct
  source 1..22: mol_type = other RNA
atgggcacaatgttcttgccgc

SEQ ID NO: 13257 - RNA, 22 nt, synthetic construct
  source 1..22: mol_type = other RNA
atgtcctcaggcaggacctggg

SEQ ID NO: 13258 - RNA, 22 nt, synthetic construct
  source 1..22: mol_type = other RNA
atgttcttgccgcagcttaaag

SEQ ID NO: 13259 - RNA, 22 nt, synthetic construct
  source 1..22: mol_type = other RNA
attgatggcttcgagtggcctg

SEQ ID NO: 13260 - RNA, 22 nt, synthetic construct
  source 1..22: mol_type = other RNA
attgtgactgctttaagctgcg

SEQ ID NO: 13261 - RNA, 22 nt, synthetic construct
  source 1..22: mol_type = other RNA
attgtgcccatcattgatggct

SEQ ID NO: 13262 - RNA, 22 nt, synthetic construct
  source 1..22: mol_type = other RNA
caacggtatcaagtgagcccca

SEQ ID NO: 13263 - RNA, 22 nt, synthetic construct
  source 1..22: mol_type = other RNA
caagaacattgtgcccatcatt

SEQ ID NO: 13264 - RNA, 22 nt, synthetic construct
  source 1..22: mol_type = other RNA
caagtgagccccagggccctgg

SEQ ID NO: 13265 - RNA, 22 nt, synthetic construct
  source 1..22: mol_type = other RNA
caatgatgggcacaatgttctt

SEQ ID NO: 13266 - RNA, 22 nt, synthetic construct
  source 1..22: mol_type = other RNA
caatgttcttgccgcagcttaa

SEQ ID NO: 13267 - RNA, 22 nt, synthetic construct
  source 1..22: mol_type = other RNA
cacaatgttcttgccgcagctt

SEQ ID NO: 13268 - RNA, 22 nt, synthetic construct
  source 1..22: mol_type = other RNA
cacagcctgcatgtcctcaggc

SEQ ID NO: 13269 - RNA, 22 nt, synthetic construct
  source 1..22: mol_type = other RNA
cactcgaagccatcaatgatgg

SEQ ID NO: 13270 - RNA, 22 nt, synthetic construct
  source 1..22: mol_type = other RNA
cacttgataccgttgaaagtaa

SEQ ID NO: 13271 - RNA, 22 nt, synthetic construct
  source 1..22: mol_type = other RNA
cagcctgcatgtcctcaggcag

SEQ ID NO: 13272 - RNA, 22 nt, synthetic construct
  source 1..22: mol_type = other RNA
caggacctggggctcaggccac

SEQ ID NO: 13273 - RNA, 22 nt, synthetic construct
  source 1..22: mol_type = other RNA
caggcaggacctggggctcagg

SEQ ID NO: 13274 - RNA, 22 nt, synthetic construct
  source 1..22: mol_type = other RNA
caggccactcgaagccatcaat

SEQ ID NO: 13275 - RNA, 22 nt, synthetic construct
  source 1..22: mol_type = other RNA
caggctgtgcttactttcaacg

SEQ ID NO: 13276 - RNA, 22 nt, synthetic construct
  source 1..22: mol_type = other RNA
cagggccctggggctcacttga

SEQ ID NO: 13277 - RNA, 22 nt, synthetic construct
  source 1..22: mol_type = other RNA
caggtcctgcctgaggacatgc

SEQ ID NO: 13278 - RNA, 22 nt, synthetic construct
  source 1..22: mol_type = other RNA
catcaatgatgggcacaatgtt

SEQ ID NO: 13279 - RNA, 22 nt, synthetic construct
  source 1..22: mol_type = other RNA
catcattgatggcttcgagtgg

SEQ ID NO: 13280 - RNA, 22 nt, synthetic construct
  source 1..22: mol_type = other RNA
catgcaggctgtgcttactttc

SEQ ID NO: 13281 - RNA, 22 nt, synthetic construct
  source 1..22: mol_type = other RNA
catgtcctcaggcaggacctgg

SEQ ID NO: 13282 - RNA, 22 nt, synthetic construct
  source 1..22: mol_type = other RNA
cattgatggcttcgagtggcct

SEQ ID NO: 13283 - RNA, 22 nt, synthetic construct
  source 1..22: mol_type = other RNA
cattgtgcccatcattgatggc

SEQ ID NO: 13284 - RNA, 22 nt, synthetic construct
  source 1..22: mol_type = other RNA
ccactcgaagccatcaatgatg

SEQ ID NO: 13285 - RNA, 22 nt, synthetic construct
  source 1..22: mol_type = other RNA
ccagggccctggggctcacttg

SEQ ID NO: 13286 - RNA, 22 nt, synthetic construct
  source 1..22: mol_type = other RNA
ccaggtcctgcctgaggacatg

SEQ ID NO: 13287 - RNA, 22 nt, synthetic construct
  source 1..22: mol_type = other RNA
ccatcaatgatgggcacaatgt

SEQ ID NO: 13288 - RNA, 22 nt, synthetic construct
  source 1..22: mol_type = other RNA
ccatcattgatggcttcgagtg

SEQ ID NO: 13289 - RNA, 22 nt, synthetic construct
  source 1..22: mol_type = other RNA
cccagggccctggggctcactt

SEQ ID NO: 13290 - RNA, 22 nt, synthetic construct
  source 1..22: mol_type = other RNA
cccaggtcctgcctgaggacat

SEQ ID NO: 13291 - RNA, 22 nt, synthetic construct
  source 1..22: mol_type = other RNA
cccatcattgatggcttcgagt

SEQ ID NO: 13292 - RNA, 22 nt, synthetic construct
  source 1..22: mol_type = other RNA
ccccaggtcctgcctgaggaca

SEQ ID NO: 13293 - RNA, 22 nt, synthetic construct
  source 1..22: mol_type = other RNA
cccccctggtcccagggccctg

SEQ ID NO: 13294 - RNA, 22 nt, synthetic construct
  source 1..22: mol_type = other RNA
ccccctggtcccagggccctgg

SEQ ID NO: 13295 - RNA, 22 nt, synthetic construct
  source 1..22: mol_type = other RNA
cccctggtcccagggccctggg

SEQ ID NO: 13296 - RNA, 22 nt, synthetic construct
  source 1..22: mol_type = other RNA
ccctggggctcacttgataccg

SEQ ID NO: 13297 - RNA, 22 nt, synthetic construct
  source 1..22: mol_type = other RNA
ccctggtcccagggccctgggg

SEQ ID NO: 13298 - RNA, 22 nt, synthetic construct
  source 1..22: mol_type = other RNA
ccgttgaaagtaagcacagcct

SEQ ID NO: 13299 - RNA, 22 nt, synthetic construct
  source 1..22: mol_type = other RNA
cctcaggcaggacctggggctc

SEQ ID NO: 13300 - RNA, 22 nt, synthetic construct
  source 1..22: mol_type = other RNA
cctgagccccaggtcctgcctg

SEQ ID NO: 13301 - RNA, 22 nt, synthetic construct
  source 1..22: mol_type = other RNA
cctgaggacatgcaggctgtgc

SEQ ID NO: 13302 - RNA, 22 nt, synthetic construct
  source 1..22: mol_type = other RNA
cctgcatgtcctcaggcaggac

SEQ ID NO: 13303 - RNA, 22 nt, synthetic construct
  source 1..22: mol_type = other RNA
cctgcctgaggacatgcaggct

SEQ ID NO: 13304 - RNA, 22 nt, synthetic construct
  source 1..22: mol_type = other RNA
cctggggctcacttgataccgt

SEQ ID NO: 13305 - RNA, 22 nt, synthetic construct
  source 1..22: mol_type = other RNA
cctggggctcaggccactcgaa

SEQ ID NO: 13306 - RNA, 22 nt, synthetic construct
  source 1..22: mol_type = other RNA
cctggtcccagggccctggggc

SEQ ID NO: 13307 - RNA, 22 nt, synthetic construct
  source 1..22: mol_type = other RNA
cgaagccatcaatgatgggcac

SEQ ID NO: 13308 - RNA, 22 nt, synthetic construct
  source 1..22: mol_type = other RNA
cgagtggcctgagccccaggtc

SEQ ID NO: 13309 - RNA, 22 nt, synthetic construct
  source 1..22: mol_type = other RNA
cggcaagaacattgtgcccatc

SEQ ID NO: 13310 - RNA, 22 nt, synthetic construct
  source 1..22: mol_type = other RNA
cggtatcaagtgagccccaggg

SEQ ID NO: 13311 - RNA, 22 nt, synthetic construct
  source 1..22: mol_type = other RNA
cgttgaaagtaagcacagcctg

SEQ ID NO: 13312 - RNA, 22 nt, synthetic construct
  source 1..22: mol_type = other RNA
ctcacttgataccgttgaaagt

SEQ ID NO: 13313 - RNA, 22 nt, synthetic construct
  source 1..22: mol_type = other RNA
ctcaggcaggacctggggctca

SEQ ID NO: 13314 - RNA, 22 nt, synthetic construct
  source 1..22: mol_type = other RNA
ctcaggccactcgaagccatca

SEQ ID NO: 13315 - RNA, 22 nt, synthetic construct
  source 1..22: mol_type = other RNA
ctcgaagccatcaatgatgggc

SEQ ID NO: 13316 - RNA, 22 nt, synthetic construct
  source 1..22: mol_type = other RNA
ctgagccccaggtcctgcctga

SEQ ID NO: 13317 - RNA, 22 nt, synthetic construct
  source 1..22: mol_type = other RNA
ctgaggacatgcaggctgtgct

SEQ ID NO: 13318 - RNA, 22 nt, synthetic construct
  source 1..22: mol_type = other RNA
ctgcatgtcctcaggcaggacc

SEQ ID NO: 13319 - RNA, 22 nt, synthetic construct
  source 1..22: mol_type = other RNA
ctgcctgaggacatgcaggctg

SEQ ID NO: 13320 - RNA, 22 nt, synthetic construct
  source 1..22: mol_type = other RNA
ctgcggcaagaacattgtgccc

SEQ ID NO: 13321 - RNA, 22 nt, synthetic construct
  source 1..22: mol_type = other RNA
ctgctttaagctgcggcaagaa

SEQ ID NO: 13322 - RNA, 22 nt, synthetic construct
  source 1..22: mol_type = other RNA
ctggggctcacttgataccgtt

SEQ ID NO: 13323 - RNA, 22 nt, synthetic construct
  source 1..22: mol_type = other RNA
ctggggctcaggccactcgaag

SEQ ID NO: 13324 - RNA, 22 nt, synthetic construct
  source 1..22: mol_type = other RNA
ctggtcccagggccctggggct

SEQ ID NO: 13325 - RNA, 22 nt, synthetic construct
  source 1..22: mol_type = other RNA
ctgtgcttactttcaacggtat

SEQ ID NO: 13326 - RNA, 22 nt, synthetic construct
  source 1..22: mol_type = other RNA
cttactttcaacggtatcaagt

SEQ ID NO: 13327 - RNA, 22 nt, synthetic construct
  source 1..22: mol_type = other RNA
cttcgagtggcctgagccccag

SEQ ID NO: 13328 - RNA, 22 nt, synthetic construct
  source 1..22: mol_type = other RNA
cttgataccgttgaaagtaagc

SEQ ID NO: 13329 - RNA, 22 nt, synthetic construct
  source 1..22: mol_type = other RNA
cttgccgcagcttaaagcagtc

SEQ ID NO: 13330 - RNA, 22 nt, synthetic construct
  source 1..22: mol_type = other RNA
ctttaagctgcggcaagaacat

SEQ ID NO: 13331 - RNA, 22 nt, synthetic construct
  source 1..22: mol_type = other RNA
ctttcaacggtatcaagtgagc

SEQ ID NO: 13332 - RNA, 22 nt, synthetic construct
  source 1..22: mol_type = other RNA
gaaagtaagcacagcctgcatg

SEQ ID NO: 13333 - RNA, 22 nt, synthetic construct
  source 1..22: mol_type = other RNA
gaacattgtgcccatcattgat

SEQ ID NO: 13334 - RNA, 22 nt, synthetic construct
  source 1..22: mol_type = other RNA
gaagccatcaatgatgggcaca

SEQ ID NO: 13335 - RNA, 22 nt, synthetic construct
  source 1..22: mol_type = other RNA
gacatgcaggctgtgcttactt

SEQ ID NO: 13336 - RNA, 22 nt, synthetic construct
  source 1..22: mol_type = other RNA
gacctggggctcaggccactcg

SEQ ID NO: 13337 - RNA, 22 nt, synthetic construct
  source 1..22: mol_type = other RNA
gactgctttaagctgcggcaag

SEQ ID NO: 13338 - RNA, 22 nt, synthetic construct
  source 1..22: mol_type = other RNA
gagattgtgactgctttaagct

SEQ ID NO: 13339 - RNA, 22 nt, synthetic construct
  source 1..22: mol_type = other RNA
gagccccaggtcctgcctgagg

SEQ ID NO: 13340 - RNA, 22 nt, synthetic construct
  source 1..22: mol_type = other RNA
gaggacatgcaggctgtgctta

SEQ ID NO: 13341 - RNA, 22 nt, synthetic construct
  source 1..22: mol_type = other RNA
gagtggcctgagccccaggtcc

SEQ ID NO: 13342 - RNA, 22 nt, synthetic construct
  source 1..22: mol_type = other RNA
gataccgttgaaagtaagcaca

SEQ ID NO: 13343 - RNA, 22 nt, synthetic construct
  source 1..22: mol_type = other RNA
gatggcttcgagtggcctgagc

SEQ ID NO: 13344 - RNA, 22 nt, synthetic construct
  source 1..22: mol_type = other RNA
gatgggcacaatgttcttgccg

SEQ ID NO: 13345 - RNA, 22 nt, synthetic construct
  source 1..22: mol_type = other RNA
gattgtgactgctttaagctgc

SEQ ID NO: 13346 - RNA, 22 nt, synthetic construct
  source 1..22: mol_type = other RNA
gcaagaacattgtgcccatcat

SEQ ID NO: 13347 - RNA, 22 nt, synthetic construct
  source 1..22: mol_type = other RNA
gcacaatgttcttgccgcagct

SEQ ID NO: 13348 - RNA, 22 nt, synthetic construct
  source 1..22: mol_type = other RNA
gcacagcctgcatgtcctcagg

SEQ ID NO: 13349 - RNA, 22 nt, synthetic construct
  source 1..22: mol_type = other RNA
gcaggacctggggctcaggcca

SEQ ID NO: 13350 - RNA, 22 nt, synthetic construct
  source 1..22: mol_type = other RNA
gcaggctgtgcttactttcaac

SEQ ID NO: 13351 - RNA, 22 nt, synthetic construct
  source 1..22: mol_type = other RNA
gcatgtcctcaggcaggacctg

SEQ ID NO: 13352 - RNA, 22 nt, synthetic construct
  source 1..22: mol_type = other RNA
gccactcgaagccatcaatgat

SEQ ID NO: 13353 - RNA, 22 nt, synthetic construct
  source 1..22: mol_type = other RNA
gccatcaatgatgggcacaatg

SEQ ID NO: 13354 - RNA, 22 nt, synthetic construct
  source 1..22: mol_type = other RNA
gcccatcattgatggcttcgag

SEQ ID NO: 13355 - RNA, 22 nt, synthetic construct
  source 1..22: mol_type = other RNA
gccccaggtcctgcctgaggac

SEQ ID NO: 13356 - RNA, 22 nt, synthetic construct
  source 1..22: mol_type = other RNA
gccctggggctcacttgatacc

SEQ ID NO: 13357 - RNA, 22 nt, synthetic construct
  source 1..22: mol_type = other RNA
gcctgagccccaggtcctgcct

SEQ ID NO: 13358 - RNA, 22 nt, synthetic construct
  source 1..22: mol_type = other RNA
gcctgaggacatgcaggctgtg

SEQ ID NO: 13359 - RNA, 22 nt, synthetic construct
  source 1..22: mol_type = other RNA
gcctgcatgtcctcaggcagga

SEQ ID NO: 13360 - RNA, 22 nt, synthetic construct
  source 1..22: mol_type = other RNA
gcggcaagaacattgtgcccat

SEQ ID NO: 13361 - RNA, 22 nt, synthetic construct
  source 1..22: mol_type = other RNA
gctcacttgataccgttgaaag

SEQ ID NO: 13362 - RNA, 22 nt, synthetic construct
  source 1..22: mol_type = other RNA
gctcaggccactcgaagccatc

SEQ ID NO: 13363 - RNA, 22 nt, synthetic construct
  source 1..22: mol_type = other RNA
gctgcggcaagaacattgtgcc

SEQ ID NO: 13364 - RNA, 22 nt, synthetic construct
  source 1..22: mol_type = other RNA
gctgtgcttactttcaacggta

SEQ ID NO: 13365 - RNA, 22 nt, synthetic construct
  source 1..22: mol_type = other RNA
gcttactttcaacggtatcaag

SEQ ID NO: 13366 - RNA, 22 nt, synthetic construct
  source 1..22: mol_type = other RNA
gcttcgagtggcctgagcccca

SEQ ID NO: 13367 - RNA, 22 nt, synthetic construct
  source 1..22: mol_type = other RNA
gctttaagctgcggcaagaaca

SEQ ID NO: 13368 - RNA, 22 nt, synthetic construct
  source 1..22: mol_type = other RNA
ggacatgcaggctgtgcttact

SEQ ID NO: 13369 - RNA, 22 nt, synthetic construct
  source 1..22: mol_type = other RNA
ggacctggggctcaggccactc

SEQ ID NO: 13370 - RNA, 22 nt, synthetic construct
  source 1..22: mol_type = other RNA
ggcaagaacattgtgcccatca

SEQ ID NO: 13371 - RNA, 22 nt, synthetic construct
  source 1..22: mol_type = other RNA
ggcacaatgttcttgccgcagc

SEQ ID NO: 13372 - RNA, 22 nt, synthetic construct
  source 1..22: mol_type = other RNA
ggcaggacctggggctcaggcc

SEQ ID NO: 13373 - RNA, 22 nt, synthetic construct
  source 1..22: mol_type = other RNA
ggccactcgaagccatcaatga

SEQ ID NO: 13374 - RNA, 22 nt, synthetic construct
  source 1..22: mol_type = other RNA
ggccctggggctcacttgatac

SEQ ID NO: 13375 - RNA, 22 nt, synthetic construct
  source 1..22: mol_type = other RNA
ggcctgagccccaggtcctgcc

SEQ ID NO: 13376 - RNA, 22 nt, synthetic construct
  source 1..22: mol_type = other RNA
ggctcacttgataccgttgaaa

SEQ ID NO: 13377 - RNA, 22 nt, synthetic construct
  source 1..22: mol_type = other RNA
ggctcaggccactcgaagccat

SEQ ID NO: 13378 - RNA, 22 nt, synthetic construct
  source 1..22: mol_type = other RNA
ggctgtgcttactttcaacggt

SEQ ID NO: 13379 - RNA, 22 nt, synthetic construct
  source 1..22: mol_type = other RNA
ggcttcgagtggcctgagcccc

SEQ ID NO: 13380 - RNA, 22 nt, synthetic construct
  source 1..22: mol_type = other RNA
gggcacaatgttcttgccgcag

SEQ ID NO: 13381 - RNA, 22 nt, synthetic construct
  source 1..22: mol_type = other RNA
gggccctggggctcacttgata

SEQ ID NO: 13382 - RNA, 22 nt, synthetic construct
  source 1..22: mol_type = other RNA
gggctcacttgataccgttgaa

SEQ ID NO: 13383 - RNA, 22 nt, synthetic construct
  source 1..22: mol_type = other RNA
gggctcaggccactcgaagcca

SEQ ID NO: 13384 - RNA, 22 nt, synthetic construct
  source 1..22: mol_type = other RNA
ggggctcacttgataccgttga

SEQ ID NO: 13385 - RNA, 22 nt, synthetic construct
  source 1..22: mol_type = other RNA
ggggctcaggccactcgaagcc

SEQ ID NO: 13386 - RNA, 22 nt, synthetic construct
  source 1..22: mol_type = other RNA
ggtatcaagtgagccccagggc

SEQ ID NO: 13387 - RNA, 22 nt, synthetic construct
  source 1..22: mol_type = other RNA
ggtcccagggccctggggctca

SEQ ID NO: 13388 - RNA, 22 nt, synthetic construct
  source 1..22: mol_type = other RNA
ggtcctgcctgaggacatgcag

SEQ ID NO: 13389 - RNA, 22 nt, synthetic construct
  source 1..22: mol_type = other RNA
gtaagcacagcctgcatgtcct

SEQ ID NO: 13390 - RNA, 22 nt, synthetic construct
  source 1..22: mol_type = other RNA
gtatcaagtgagccccagggcc

SEQ ID NO: 13391 - RNA, 22 nt, synthetic construct
  source 1..22: mol_type = other RNA
gtcccagggccctggggctcac

SEQ ID NO: 13392 - RNA, 22 nt, synthetic construct
  source 1..22: mol_type = other RNA
gtcctcaggcaggacctggggc

SEQ ID NO: 13393 - RNA, 22 nt, synthetic construct
  source 1..22: mol_type = other RNA
gtcctgcctgaggacatgcagg

SEQ ID NO: 13394 - RNA, 22 nt, synthetic construct
  source 1..22: mol_type = other RNA
gtgactgctttaagctgcggca

SEQ ID NO: 13395 - RNA, 22 nt, synthetic construct
  source 1..22: mol_type = other RNA
gtgagccccagggccctgggac

SEQ ID NO: 13396 - RNA, 22 nt, synthetic construct
  source 1..22: mol_type = other RNA
gtgcccatcattgatggcttcg

SEQ ID NO: 13397 - RNA, 22 nt, synthetic construct
  source 1..22: mol_type = other RNA
gtgcttactttcaacggtatca

SEQ ID NO: 13398 - RNA, 22 nt, synthetic construct
  source 1..22: mol_type = other RNA
gtggcctgagccccaggtcctg

SEQ ID NO: 13399 - RNA, 22 nt, synthetic construct
  source 1..22: mol_type = other RNA
gttcttgccgcagcttaaagca

SEQ ID NO: 13400 - RNA, 22 nt, synthetic construct
  source 1..22: mol_type = other RNA
gttgaaagtaagcacagcctgc

SEQ ID NO: 13401 - RNA, 22 nt, synthetic construct
  source 1..22: mol_type = other RNA
taagcacagcctgcatgtcctc

SEQ ID NO: 13402 - RNA, 22 nt, synthetic construct
  source 1..22: mol_type = other RNA
taagctgcggcaagaacattgt

SEQ ID NO: 13403 - RNA, 22 nt, synthetic construct
  source 1..22: mol_type = other RNA
taccgttgaaagtaagcacagc

SEQ ID NO: 13404 - RNA, 22 nt, synthetic construct
  source 1..22: mol_type = other RNA
tactttcaacggtatcaagtga

SEQ ID NO: 13405 - RNA, 22 nt, synthetic construct
  source 1..22: mol_type = other RNA
tatcaagtgagccccagggccc

SEQ ID NO: 13406 - RNA, 22 nt, synthetic construct
  source 1..22: mol_type = other RNA
tcaacggtatcaagtgagcccc

SEQ ID NO: 13407 - RNA, 22 nt, synthetic construct
  source 1..22: mol_type = other RNA
tcaagtgagccccagggccctg

SEQ ID NO: 13408 - RNA, 22 nt, synthetic construct
  source 1..22: mol_type = other RNA
tcaatgatgggcacaatgttct

SEQ ID NO: 13409 - RNA, 22 nt, synthetic construct
  source 1..22: mol_type = other RNA
tcacttgataccgttgaaagta

SEQ ID NO: 13410 - RNA, 22 nt, synthetic construct
  source 1..22: mol_type = other RNA
tcaggcaggacctggggctcag

SEQ ID NO: 13411 - RNA, 22 nt, synthetic construct
  source 1..22: mol_type = other RNA
tcaggccactcgaagccatcaa

SEQ ID NO: 13412 - RNA, 22 nt, synthetic construct
  source 1..22: mol_type = other RNA
tcattgatggcttcgagtggcc

SEQ ID NO: 13413 - RNA, 22 nt, synthetic construct
  source 1..22: mol_type = other RNA
tcccagggccctggggctcact

SEQ ID NO: 13414 - RNA, 22 nt, synthetic construct
  source 1..22: mol_type = other RNA
tcctcaggcaggacctggggct

SEQ ID NO: 13415 - RNA, 22 nt, synthetic construct
  source 1..22: mol_type = other RNA
tcctgcctgaggacatgcaggc

SEQ ID NO: 13416 - RNA, 22 nt, synthetic construct
  source 1..22: mol_type = other RNA
tcgaagccatcaatgatgggca

SEQ ID NO: 13417 - RNA, 22 nt, synthetic construct
  source 1..22: mol_type = other RNA
tcgagtggcctgagccccaggt

SEQ ID NO: 13418 - RNA, 22 nt, synthetic construct
  source 1..22: mol_type = other RNA
tcttgccgcagcttaaagcagt

SEQ ID NO: 13419 - RNA, 22 nt, synthetic construct
  source 1..22: mol_type = other RNA
tgaaagtaagcacagcctgcat

SEQ ID NO: 13420 - RNA, 22 nt, synthetic construct
  source 1..22: mol_type = other RNA
tgactgctttaagctgcggcaa

SEQ ID NO: 13421 - RNA, 22 nt, synthetic construct
  source 1..22: mol_type = other RNA
tgagccccaggtcctgcctgag

SEQ ID NO: 13422 - RNA, 22 nt, synthetic construct
  source 1..22: mol_type = other RNA
tgaggacatgcaggctgtgctt

SEQ ID NO: 13423 - RNA, 22 nt, synthetic construct
  source 1..22: mol_type = other RNA
tgataccgttgaaagtaagcac

SEQ ID NO: 13424 - RNA, 22 nt, synthetic construct
  source 1..22: mol_type = other RNA
tgatggcttcgagtggcctgag

SEQ ID NO: 13425 - RNA, 22 nt, synthetic construct
  source 1..22: mol_type = other RNA
tgatgggcacaatgttcttgcc

SEQ ID NO: 13426 - RNA, 22 nt, synthetic construct
  source 1..22: mol_type = other RNA
tgcaggctgtgcttactttcaa

SEQ ID NO: 13427 - RNA, 22 nt, synthetic construct
  source 1..22: mol_type = other RNA
tgcatgtcctcaggcaggacct

SEQ ID NO: 13428 - RNA, 22 nt, synthetic construct
  source 1..22: mol_type = other RNA
tgcccatcattgatggcttcga

SEQ ID NO: 13429 - RNA, 22 nt, synthetic construct
  source 1..22: mol_type = other RNA
tgcctgaggacatgcaggctgt

SEQ ID NO: 13430 - RNA, 22 nt, synthetic construct
  source 1..22: mol_type = other RNA
tgcggcaagaacattgtgccca

SEQ ID NO: 13431 - RNA, 22 nt, synthetic construct
  source 1..22: mol_type = other RNA
tgcttactttcaacggtatcaa

SEQ ID NO: 13432 - RNA, 22 nt, synthetic construct
  source 1..22: mol_type = other RNA
tgctttaagctgcggcaagaac

SEQ ID NO: 13433 - RNA, 22 nt, synthetic construct
  source 1..22: mol_type = other RNA
tggcctgagccccaggtcctgc

SEQ ID NO: 13434 - RNA, 22 nt, synthetic construct
  source 1..22: mol_type = other RNA
tggcttcgagtggcctgagccc

SEQ ID NO: 13435 - RNA, 22 nt, synthetic construct
  source 1..22: mol_type = other RNA
tgggcacaatgttcttgccgca

SEQ ID NO: 13436 - RNA, 22 nt, synthetic construct
  source 1..22: mol_type = other RNA
tggggctcacttgataccgttg

SEQ ID NO: 13437 - RNA, 22 nt, synthetic construct
  source 1..22: mol_type = other RNA
tggggctcaggccactcgaagc

SEQ ID NO: 13438 - RNA, 22 nt, synthetic construct
  source 1..22: mol_type = other RNA
tggtcccagggccctggggctc

SEQ ID NO: 13439 - RNA, 22 nt, synthetic construct
  source 1..22: mol_type = other RNA
tgtcctcaggcaggacctgggg

SEQ ID NO: 13440 - RNA, 22 nt, synthetic construct
  source 1..22: mol_type = other RNA
tgtgactgctttaagctgcggc

SEQ ID NO: 13441 - RNA, 22 nt, synthetic construct
  source 1..22: mol_type = other RNA
tgtgcccatcattgatggcttc

SEQ ID NO: 13442 - RNA, 22 nt, synthetic construct
  source 1..22: mol_type = other RNA
tgtgcttactttcaacggtatc

SEQ ID NO: 13443 - RNA, 22 nt, synthetic construct
  source 1..22: mol_type = other RNA
tgttcttgccgcagcttaaagc

SEQ ID NO: 13444 - RNA, 22 nt, synthetic construct
  source 1..22: mol_type = other RNA
ttaagctgcggcaagaacattg

SEQ ID NO: 13445 - RNA, 22 nt, synthetic construct
  source 1..22: mol_type = other RNA
ttactttcaacggtatcaagtg

SEQ ID NO: 13446 - RNA, 22 nt, synthetic construct
  source 1..22: mol_type = other RNA
ttcaacggtatcaagtgagccc

SEQ ID NO: 13447 - RNA, 22 nt, synthetic construct
  source 1..22: mol_type = other RNA
ttcgagtggcctgagccccagg

SEQ ID NO: 13448 - RNA, 22 nt, synthetic construct
  source 1..22: mol_type = other RNA
ttcttgccgcagcttaaagcag

SEQ ID NO: 13449 - RNA, 22 nt, synthetic construct
  source 1..22: mol_type = other RNA
ttgaaagtaagcacagcctgca

SEQ ID NO: 13450 - RNA, 22 nt, synthetic construct
  source 1..22: mol_type = other RNA
ttgataccgttgaaagtaagca

SEQ ID NO: 13451 - RNA, 22 nt, synthetic construct
  source 1..22: mol_type = other RNA
ttgatggcttcgagtggcctga

SEQ ID NO: 13452 - RNA, 22 nt, synthetic construct
  source 1..22: mol_type = other RNA
ttgtgactgctttaagctgcgg

SEQ ID NO: 13453 - RNA, 22 nt, synthetic construct
  source 1..22: mol_type = other RNA
ttgtgcccatcattgatggctt

SEQ ID NO: 13454 - RNA, 22 nt, synthetic construct
  source 1..22: mol_type = other RNA
tttaagctgcggcaagaacatt

SEQ ID NO: 13455 - RNA, 22 nt, synthetic construct
  source 1..22: mol_type = other RNA
tttcaacggtatcaagtgagcc

SEQ ID NO: 13456 - RNA, 20 nt, synthetic construct
  source 1..20: mol_type = other RNA
agagaccgcgtggcgcgcat

SEQ ID NO: 13457 - RNA, 20 nt, synthetic construct
  source 1..20: mol_type = other RNA
gcagctgcaggtgcaccttc

SEQ ID NO: 13458 - RNA, 20 nt, synthetic construct
  source 1..20: mol_type = other RNA
aaaaaaatgtacttggttcc

SEQ ID NO: 13459 - RNA, 17 nt, synthetic construct
  source 1..17: mol_type = other RNA
aaaatgtacttggttcc

SEQ ID NO: 13460 - RNA, 17 nt, synthetic construct
  source 1..17: mol_type = other RNA
aaaaatgtacttggttc

SEQ ID NO: 13461 - RNA, 17 nt, synthetic construct
  source 1..17: mol_type = other RNA
aaaaaatgtacttggtt

SEQ ID NO: 13462 - RNA, 17 nt, synthetic construct
  source 1..17: mol_type = other RNA
aaaaaaatgtacttggt

SEQ ID NO: 13463 - RNA, 20 nt, synthetic construct
  source 1..20: mol_type = other RNA
gcgcttgctggagcagatcc

SEQ ID NO: 13464 - RNA, 20 nt, synthetic construct
  source 1..20: mol_type = other RNA
gcgaactgcgcgctgcacgg

SEQ ID NO: 13465 - RNA, 20 nt, synthetic construct
  source 1..20: mol_type = other RNA
agcgagcgggaagagccact

SEQ ID NO: 13466 - RNA, 20 nt, synthetic construct
  source 1..20: mol_type = other RNA
tatccagagcctgaaacgcc

SEQ ID NO: 13467 - RNA, 20 nt, synthetic construct
  source 1..20: mol_type = other RNA
ctctgacacgcggtgcagca

SEQ ID NO: 13468 - RNA, 20 nt, synthetic construct
  source 1..20: mol_type = other RNA
cattccccgctgccctgtac

SEQ ID NO: 13469 - RNA, 20 nt, synthetic construct
  source 1..20: mol_type = other RNA
aaggtgcacctgcagcttca

SEQ ID NO: 13470 - RNA, 20 nt, synthetic construct
  source 1..20: mol_type = other RNA
catgcaggaccatgactgca

SEQ ID NO: 13471 - protein, 1370 aa, synthetic construct
MTKVKDYYIGLDIGTSSVGWAVTDEAYNVLKFNSKKMWGVRLFDDAKTAEERRGQRGARRRLDRKKERLSLLQDFFAEEVAKVDPNFFLRLDNSDLYMEDKDQKLKSKYTLFNDKDFKDKNFHKKYPTIHHLLMDLIEDDSKKDIRLVYLACHYLLKNRGHFIFEGQKFDTKSSFENSLNELKVHLNDEYGLDLEFDNENLINILTDPKLNKTAKKKELKSVIGDTKFLKAVSAIMIGSSQKLVDLFENPEDFDDSAIKSVDFSTTSFDDKYSDYELALGDKIALVNILKEIYDSSILENLLKEADKSKDGNKYISNAFVKKYNKHGQDLKEFKRLVRQYHKSAYFDIFRSEKVNDNYVSYTKSSISNNKRVKANKFTDQEAFYKFAKKHLETIKYKINKVNGSKADLELIDGMLRDMEFKNFMPKIKSSDNGVIPYQLKLMELNKILENQSKHHEFLNVSDEYGSVCDKIASIMEFRIPYYVGPLNPNSKYAWIKKQKDSEITPWNFKDVVDLDSSREEFIDSLIGRCTYLKDEKVLPKASLLYNEYMVLNELNNLKLNDLPITEEMKKKIFDQLFKTRKKVTLKAVANLLKKEFNINGEILLSGTDGDFKQGLNSYNDFKAIVGDKVDSDDYRDKIEEIIKLIVLYGDDKSYLQKKIKAGYGKYFTDSEIKKMAGLNYKDWGRLSKKLLTGLEGANKITGERGSIIHFMREYNLNLMELMSASFTFTEEIQKLNPVDDRKLSYEMVDELYLSPSVKRMLWQSLRIVDEIKNIMGTDSKKIFIEMARGKEEVKARKESRKNQLLKFYKDGKKAFISEIGEERYSYLLSEIEGEEENKFRWDNLYLYYTQLGRCMYSLEPIDISELSSKNIYDQDHIYPKSKIYDDSIENRVLVKKDLNSKKGNSYPIPDEILNKNCYAYWKILYDKGLIGQKKYTRLTRRTGFTDDELVQFISRQIVETRQATKETANLLKTICKNSEIVYSKAENASRFRQEFDIVKCRAVNDLHHMHDAYINIIVGNVYNTKFTKDPMNFVKKQEKARSYNLENMFKYDVKRGGYTAWIADDEKGTVKNASIKRIRKELEGTNYRFTRMNYIESGALFNATLQRKNKGSRPLKDKGPKSSIEKYGGYTNINKACFAVLDIKSKNKIERKLMPVEREIYAKQKNDKKLSDEIFSKYLKDRFGIEDYRVVYPVVKMRTLLKIDGSYYFITGGSDKTLELRSALQLILPKKNEWAIKQIDKSSENDYLTIERIQDLTEELVYNTFDIIVNKFKTSVFKKSFLNLFQDDKIENIDFKFKSMDFKEKCKTLLMLVKAIRASGVRQDLKSIDLKSDYGRLSSKTNNIGNYQEFKIINQSITGLFENEVDLLKL

SEQ ID NO: 13472 - protein, 1062 aa, synthetic construct
MEKRLGLDIGTNSIGWCLYEGDSILDIGVRIFSDGRDPKSGASLAVDRRNARAMRRRRDRYLGRRSALIKALKAHGLFPAEQDAAKALEREDPYSLRVRALDHRLDPHQIGRAIFHLNQRRGFRSNRKADRVLGDQESGLISTATRVLDEAMAKSGARTLGEFLASRDTRRVRMRPDVKGYDFYPNRQHYLEEFEKIWDAQSQYHPDLLSQQAKSAIHRIIFHQRPLKPQAVGTCTFAGLHGIPGDETRLPKAHPLFQQRRLYEEVNQLEIVCASAPARKLTRDERDALILKLQDKKKVTFSTLARTIRLKEGERFNKESENRKDLAGDEVRAEMSDKTRFGRRWFHLSLDEQWSVIDRLLNEESTEDLLAWLEKEWSLPSDVAEAVANAHLPDGHGRFGLTATVRLLEHLKADVVTYAEAARRAGFHHSDFRDGACYDELPYYGEILSREIAPGKDEYGDPLERQWGKITNPTVHIGLNQLRRLINALVRRHGRPDFIFVELARELKLNEKQKADHKRRIKQTTDAARARAEKLREIGQRDSGSNRMLLRIWEELNPSNPLDRRCPYCAEPISIEMLMSGSADIDHIVPYSRCLDDSAANKVVAHNHCNRQKGNRTPWEQWGQTTRWPLIQEQVARMHRSKQWRFGPDAMERVDRDGGFIARQLTDTQYLSRIAAQYLSALYTPDEGRRVYAVTGRLTAMLRRLWGLNDILPDHNWVLNPHSNAPKNRLDHRHHAIDAAVVGATTPAMIQQVARAAARAEEQDLDRLFADLPPPWPGFREELQGRIMAAVVSHKPDHGRKGRPLPGRDSTSGRLHNDTAYGFTGRRNAKGMPIVVTRKPLLALKPEDLTDPERIPDPALQGALFEATRGATGKDFEKALRDFSRRDGPYQGIRRIRLTEALNVIPIRDRTGHAYKGVKGDANARFDVWRLPDGKWITRWKDRDGIEHSGIVSLFDAHQPSQVYHRPHPAAKKVLSLRQNDLVAVEHDGDPGKIMRVVKFSANGSITFAPHNEAGPLKTRDTDPADPFRYVTTVASGLKKMRARQVRIDELGKVHDPGPRED

SEQ ID NO: 13473 - protein, 1348 aa, synthetic construct
MSIKSDYFLGLDIGTDSIGWAVTDPEYHILRRKGKALWGIRLFDAANTAAERRTFRTSRRRIQRRRQRIRLLQELFAEEMVKLDPGFFQRLSDSAFWQEDKQEQQIYSLFTCENYTDVDYYREYPTIYHLRSALIQEKKEFDLRLLYLALHHLMKHRGHFLFNGSINNVTSFHTTFQTFADCLYDEFDIELECDSEDRFAEILKDKHARKTGKCSELEIICHIEKSNKQLKELFKLITGMKASLSVVFGDDELAEIEHNKISFSESSYDEVRLALEDEIQERTGILDIFHAVYSWAILADILEGGEYEGNSYLSVAKVSTYKKHGDDLRLLRTLVREYCPDHYKSFFSVSGKENYCAYAGTLKKNGKKQPIKRCSQEDFYKALKKLLNQMPTEQPEVKDIFIEIENGTFLPLQVSKDNGVIPYQVNKMELEKILQNAEEYLPFLKNIDEECGKTVSKKIIDLFEFRIPYYVGPLNTAKGENCWMVRKEAGRIYPWNFDEKVDRDQSAEKFIRRMTNQCTYLIHEDVVPKNSLLYSEFMVLNELNNVKIRSEKLPVELKQAIVLDLFKKQKQITGKKLLNYLNANGYDVKKEDLSGFDGNFKSSLSSYLTLKKVFGEELDKYSVQQMAEDIILWITLYGDDQKMLRRVIRKHYEQQLSEEQILSLSKLKFQGWGRLSRRLLSEMEGVDCETGECMTVMQGLRNTQNNLMQLLSQQFSFMELIEEENGNYYVDEITYDNLVKDMVISPSVKRAVWQTVQIVEEIKGVMGCQPKKIFVEMARSDEEKKRTVSRKDRLLEAYDAIKDEARQWQEELQKYSDGDFKAIKLYLYYTQMGQCMYTGRKIDLSQLNDATVWDRDHIYPQSKTKDDSLDNLVLVDRSVNAKKSDGMLSPEIQQRMRATWKYLKEKKLISEKKYERLTRVSPLTDEELAGFINRQLVETRQSSKAVATLLKRVYDEAEIVYVKAEAVSNFRRDNLDYIKVRDLNDYHHAKDAYQNIVVGNVFHEKFTSNPLRWLKNNPNTKYSLNQMFNFDLEKNGVVIWKRGKAGSIKCVEETLKRNDILFTRYAFCNKGGFFNQMLTAAPEDKTKAKGLVPIKKGMETWKYGGYTSVTPSHFMLVASKDKKGKEIRTIETVPLYRWKEFKENPDALLQYCREFYGLKEPKVLIPCIKKNARLVVNGFPMHLKGSTGKQLILQGAVQLCLNNENIKYLKKVTKYLEYNAQRRDKRTLLEVREVTGINKEENIQLYDVFVDKLSNTIYQYRPANPKDNLIKGREKFIELGLAEQCVVLGEVLHLFQCKPLTSDLTLIGGSPNTGTIKITKTISNCNVVKLLSQSIAGVKVREINLLII

SEQ ID NO: 13474 - RNA, 134 nt, synthetic construct
  source 1..134: mol_type = other RNA
tgctctgacacgcggtgcagcagtttgagagttatgtaagaaattacatgacgagttcaaataaaaatttattcaaaccgcctatttataggccgcagatgttctgcattatgcttgctattgcaagctttttt

SEQ ID NO: 13475 - RNA, 102 nt, synthetic construct
  source 1..102: mol_type = other RNA
gtagcggtgttggcgactaacagttgccgctggagaaatccagttgttaacaagcagcttgactgcaccaaataaggcgggggctgcggccctcgctttttt

SEQ ID NO: 13476 - RNA, 129 nt, synthetic construct
  source 1..129: mol_type = other RNA
cgcgcggcctgcacacgcgtctgtttgagagtagtgtaagaaattacactacaagttcaaataaaaatttattcaaatccatttgctacattgtgtagaatttaaagatctggcaacagatcttttttt

SEQ ID NO: 13477 - RNA, 129 nt, synthetic construct
  source 1..129: mol_type = other RNA
cgccactgcgcgctggcgctgggtttgagagtagtgtaagaaattacactacaagttcaaataaaaatttattcaaatccatttgctacattgtgtagaatttaaagatctggcaacagatcttttttt

SEQ ID NO: 13478 - RNA, 129 nt, synthetic construct
  source 1..129: mol_type = other RNA
gtgtctgagcagcagctgctgggtttgagagtagtgtaagaaattacactacaagttcaaataaaaatttattcaaatccatttgctacattgtgtagaatttaaagatctggcaacagatcttttttt

SEQ ID NO: 13479 - RNA, 129 nt, synthetic construct
  source 1..129: mol_type = other RNA
gatgtcttcatcagctaccgccgtttgagagtagtgtaagaaattacactacaagttcaaataaaaatttattcaaatccatttgctacattgtgtagaatttaaagatctggcaacagatcttttttt

SEQ ID NO: 13480 - protein, 9 aa, synthetic construct
YPYDVPDYA

SEQ ID NO: 13481 - protein, 7 aa, synthetic construct
PKKKRKV

SEQ ID NO: 13482 - protein, 19 aa, synthetic construct
ATNFSLLKQAGDVEENPGP

SEQ ID NO: 13483 - protein, 236 aa, synthetic construct
MVSKGEEDNMAIIKEFMRFKVHMEGSVNGHEFEIEGEGEGRPYEGTQTAKLKVTKGGPLPFAWDILSPQFMYGSKAYVKHPADIPDYLKLSFPEGFKWERVMNFEDGGVVTVTQDSSLQDGEFIYKVKLRGTNFPSDGPVMQKKTMGWEASSERMYPEDGALKGEIKQRLKLKDGGHYDAEVKTTYKAKKPVQLPGAYNVNIKLDITSHNEDYTIVEQYERAEGRHSTGGMDELYK

SEQ ID NO: 13484 - DNA, 27 bp, synthetic construct
  source 1..27: mol_type = other DNA
tacccatacgatgttccagattacgct

SEQ ID NO: 13485 - DNA, 21 bp, synthetic construct
  source 1..21: mol_type = other DNA
ccaaaaaagaaaagaaaagtt

SEQ ID NO: 13486 - DNA, 57 bp, synthetic construct
  source 1..57: mol_type = other DNA
gccaccaacttcagcctgctgaagcaggccggcgacgtggaggagaaccccggcccc

SEQ ID NO: 13487 - DNA, 711 bp, synthetic construct
  source 1..711: mol_type = other DNA
atggtgagcaagggcgaggaggataacatggccatcatcaaggagttcatgcgcttcaaggtgcacatggagggctccgtgaacggccacgagttcgagatcgagggcgagggcgagggccgcccctacgagggcacccagaccgccaagctgaaggtgaccaagggtggccccctgcccttcgcctgggacatcctgtcccctcagttcatgtacggctccaaggcctacgtgaagcaccccgccgacatccccgactacttgaagctgtccttccccgagggcttcaagtgggagcgcgtgatgaacttcgaggacggcggcgtggtgaccgtgacccaggactcctccctgcaggacggcgagttcatctacaaggtgaagctgcgcggcaccaacttcccctccgacggccccgtaatgcagaagaagaccatgggctgggaggcctcctccgagcggatgtaccccgaggacggcgccctgaagggcgagatcaagcagaggctgaagctgaaggacggcggccactacgacgctgaggtcaagaccacctacaaggccaagaagcccgtgcagctgcccggcgcctacaacgtcaacatcaagttggacatcacctcccacaacgaggactacaccatcgtggaacagtacgaacgcgccgagggccgccactccaccggcggcatggacgagctgtacaagtag
